(19) United States
(12) Patent Application Publication
(10) Pub. No.: US 2002/0142952 A1
(43) Pub. Date: Oct. 3, 2002

(54) Polynucleotides encoding novel secreted proteins

(76) Inventors: Gordon G. Wong, Brookline, MA (US); Hilary F. Clark, San Francisco, CA (US); Kim Fechtel, Arlington, MA (US); Michael J. Agostino, Andover, MA (US); Steven H. Howes, Cambridge, MA (US); Richard J. Resnick, Somerville, MA (US); Kalmalakar Gulukota, Lawrenceville, NJ (US); James R. Graham, Arlington, MA (US)

Correspondence Address: LAHIVE & COCKFIELD, 28 STATE STREET, BOSTON, MA, 02109, US

(21) Appl. No.: 09/822,830

(22) Filed: Mar. 29, 2001

Related U.S. Application Data
(60) Provisional application No. 60/195,604, filed on Apr. 6, 2000.

(51) Int. Cl. A61K 38/17; C07H 21/04; C12P 21/02; C12N 5/06

(52) U.S. Cl. 514/12; 530/350; 536/23.1; 435/325; 435/320.1; 435/69.1

(57) ABSTRACT

Isolated polynucleotides which have been derived from a variety of human tissue sources, and which encode novel secreted proteins, are provided. Also provided are methods for producing proteins using these polynucleotides, and the proteins so produced.

### RELATED APPLICATIONS

[0001] This application claims the benefit of prior-filed provisional patent application U.S. Serial No. 60/195,604 entitled “Polynucleotides Encoding Novel Secreted Proteins”, filed Apr. 6, 2000. The content of the above-referenced application is incorporated in its entirety.

### FIELD OF THE INVENTION

[0002] The present invention provides novel polynucleotides and proteins encoded by such polynucleotides, along with therapeutic, diagnostic and research utilities for these polynucleotides and proteins.

### BACKGROUND OF THE INVENTION

[0003] Gargantuan efforts have been employed by various investigational projects to randomly sequence portions of naturally-occurring cDNAs. The rationale behind this approach to identification and sequencing genes is founded in two basic principles: (1) that transcribed cDNAs represent the product of the most important genes, namely those that are actually expressed in vivo, and (2) that efforts to sequence genes and other portions of the genome of target organisms which are not actually expressed wastes substantial effort on areas not likely to yield genetic information of therapeutic importance. Thus, the high-throughput sequencing efforts focus on only those portions of the genome which are expressed. The randomly produced cDNA sequences represent “expressed sequence tags” or “ESTs”, which identify and can be used as probes for the longer, full-length cDNA or genomic sequence from which they were transcribed.

[0004] Although this “shortcut” approach to genomic sequencing presents savings of effort compared to sequencing of the complete genome, it still produced a vast array of ESTs which may not be directly useful as protein therapeutics. To date, the majority of protein-related drug discovery has focused on the use of secreted proteins to produce a desired therapeutic effect. Since the EST approach theoretically identifies all expressed proteins, it produces an EST library which contains a mixture of secreted proteins (such as hormones, cytokines and receptors) and non-secreted proteins (such as, for example, metabolic enzymes and cellular structural proteins), without identifying which ESTs correspond to proteins falling into either category. As a result, these methods are not optimally tailored to the needs of investigators searching for secreted proteins because they must separate the secreted “wheat” from the non-secreted “chaff”, wasting effort and resources in the process.

[0005] Technology aimed at the discovery of protein factors (including e.g., cytokines, such as lymphokines, interferons, CSFs and interleukins) has matured rapidly over the past decade. The now routine hybridization cloning and expression cloning techniques clone novel polynucleotides “directly” in the sense that they rely on information directly related to the discovered protein (i.e., partial DNA/amino acid sequence of the protein in the case of hybridization cloning; activity of the protein in the case of expression cloning).

[0006] More recent “indirect” cloning techniques such as signal sequence cloning, which isolates DNA sequences based on the presence of a now well-recognized secretory leader sequence motif, as well as various PCR-based or low stringency hybridization cloning techniques, have advanced the state of the art by making available large numbers of DNA/amino acid sequences for proteins that are known to have biological activity by virtue of their secreted nature in the case of leader sequence cloning, or by virtue of the cell or tissue source in the case of PCR-based techniques. Co-assigned U.S. Pat. No. 5,536,637, which is incorporated herein by reference, provides methods for focusing genomic sequencing efforts on sequences encoding the secreted proteins which are of most interest for identification of protein therapeutics. The '637 patent discloses a “signal sequence trap” which selectively identifies partial sequences encoding secreted proteins, namely “secreted expressed sequence tags” or “sESTs”. The sequences of these sESTs can be used to design probes to isolate the full-length cDNA clones that encode secreted proteins.

[0007] It is to these secreted proteins and the full-length polynucleotides encoding them that the present invention is directed.

### SUMMARY OF THE INVENTION

[0008] The present invention provides for full-length cDNAs isolated from a variety of human RNA/cDNA sources which encode novel secreted proteins.

[0009] In preferred embodiments, the present invention provides an isolated polynucleotide comprising a nucleotide sequence selected from the group consisting of:

[0010] SEQ ID NO:1, SEQ ID NO:2, SEQ ID NO:3, SEQ ID NO:4, SEQ ID NO:5, SEQ ID NO:6, SEQ ID NO:7, SEQ ID NO:8, SEQ ID NO:9, SEQ ID NO:10, SEQ ID NO:11, SEQ ID NO:12, SEQ ID NO:13, SEQ ID NO:14, SEQ ID NO:15, SEQ ID NO:16, SEQ ID NO:17, SEQ ID NO:18, SEQ ID NO:19, SEQ ID NO:20, SEQ ID NO:21, SEQ ID NO:22, SEQ ID NO:23, SEQ ID NO:24, SEQ ID NO:25, SEQ ID NO:26, SEQ ID NO:27, SEQ ID NO:28, SEQ ID NO:29, SEQ ID NO:30, SEQ ID NO:31, SEQ ID NO:32, SEQ ID NO:33, SEQ ID NO:34, SEQ ID NO:35, SEQ ID NO:36, SEQ ID NO:37, SEQ ID NO:38, SEQ ID NO:39, SEQ ID NO:40, SEQ ID NO:41, SEQ ID NO:42, SEQ ID NO:43, SEQ ID NO:44, SEQ ID NO:45, SEQ ID NO:46, SEQ ID NO:47, SEQ ID NO:48, SEQ ID NO:49, SEQ ID NO:50, SEQ ID NO:51, SEQ ID NO:52, SEQ ID NO:53, SEQ ID NO:54, SEQ ID NO:55, SEQ ID NO:56, SEQ ID NO:57, SEQ ID NO:58, SEQ ID NO:59, SEQ ID NO:60, SEQ ID NO:61, SEQ ID NO:62, SEQ ID NO:63, SEQ ID NO:64, SEQ ID NO:65, SEQ ID NO:66, SEQ ID NO:67, SEQ ID NO:68, SEQ ID NO:69, SEQ ID NO:70, SEQ ID NO:71, SEQ ID NO:72, SEQ ID NO:73, SEQ ID NO:74, SEQ ID NO:75, SEQ ID NO:76, SEQ ID NO:77, SEQ ID NO:78, SEQ ID NO:79, SEQ ID NO:80, SEQ ID NO:81, SEQ ID NO:82, SEQ ID NO:83, SEQ ID NO:84, SEQ ID NO:85, SEQ ID NO:86, SEQ ID NO:87, SEQ ID NO:88, SEQ ID NO:89, SEQ ID NO:90, SEQ ID NO:91, SEQ ID NO:92, SEQ ID NO:93, SEQ ID NO:94, SEQ ID NO:95, SEQ ID NO:96, SEQ ID NO:97, SEQ ID NO:98, SEQ ID NO:99, SEQ ID NO:100, SEQ ID NO:101, SEQ ID NO:102, SEQ ID NO:103, SEQ ID NO:104, SEQ ID NO:105, SEQ ID NO:106, SEQ ID NO:107, SEQ ID NO:108, SEQ ID NO:109, SEQ ID NO:110, SEQ ID NO:111, SEQ ID NO:112, SEQ ID NO:113, SEQ ID NO:114, SEQ ID NO:115, SEQ ID NO:116, SEQ ID NO:117, SEQ ID NO:118, SEQ ID NO:119, SEQ ID NO:120, SEQ ID NO:121, SEQ ID NO:122, SEQ ID NO:123, SEQ ID NO:124, SEQ ID NO:125, SEQ ID NO:126, SEQ ID NO:127, SEQ ID NO:128, SEQ ID NO:129, SEQ ID NO:130, SEQ ID NO:131, SEQ ID NO:132, SEQ ID NO:133, SEQ ID NO:134, SEQ ID NO:135, SEQ ID NO:136, SEQ ID NO:137, SEQ ID NO:138, SEQ ID NO:139, SEQ ID NO:140, SEQ ID NO:141, SEQ ID NO:142, SEQ ID NO:143, SEQ ID NO:144, SEQ ID NO:145, SEQ ID NO:146, SEQ ID NO:147, SEQ ID NO:148, SEQ ID NO:149, SEQ ID NO:150, SEQ ID NO:151, SEQ ID NO:152, SEQ ID NO:153, SEQ ID NO:154, SEQ ID NO:155, SEQ ID NO:156, SEQ ID NO:157, SEQ ID NO:158, SEQ ID NO:159, SEQ ID NO:160, SEQ ID NO:161, SEQ ID NO:162, SEQ ID NO:163, SEQ ID NO:164, SEQ ID NO:165, SEQ ID NO:166, SEQ ID NO:167, SEQ ID NO:168, SEQ ID NO:169, SEQ ID NO:170, SEQ ID NO:171, SEQ ID NO:172, SEQ ID NO:173, SEQ ID NO:174, SEQ ID NO:175, SEQ ID NO:176, SEQ ID NO:177, SEQ ID NO:178, SEQ ID NO:179, SEQ ID NO:180, SEQ ID NO:181, SEQ ID NO:182, SEQ ID NO:183, SEQ ID NO:184, SEQ ID NO:185, SEQ ID NO:186, SEQ ID NO:187, SEQ ID NO:188, SEQ ID NO:189, SEQ ID NO:190, SEQ ID NO:191, SEQ ID NO:192, SEQ ID NO:193, SEQ ID NO:194, SEQ ID NO:195, SEQ ID NO:196, SEQ ID NO:197, SEQ ID NO:198, SEQ ID NO:199, SEQ ID NO:200, SEQ ID NO:201, SEQ ID NO:202, SEQ ID NO:203, SEQ ID NO:204, SEQ ID NO:205, SEQ ID NO:206, SEQ ID NO:207, SEQ ID NO:208, SEQ ID NO:209, SEQ ID NO:210, SEQ ID NO:211, SEQ ID NO:212, SEQ ID NO:213, SEQ ID NO:214, SEQ ID NO:215, SEQ ID NO:216, SEQ ID NO:217, SEQ ID NO:218, SEQ ID NO:219, SEQ ID NO:220, SEQ ID NO:221, SEQ ID NO:222, SEQ ID NO:223, SEQ ID NO:224, SEQ ID NO:225, SEQ ID NO:226, SEQ ID NO:227, SEQ ID NO:228, SEQ ID NO:229, SEQ ID NO:230, SEQ ID NO:231, SEQ ID NO:232, SEQ ID NO:233, SEQ ID NO:234, SEQ ID NO:235, SEQ ID NO:236, SEQ ID NO:237, SEQ ID NO:238, SEQ ID NO:239, SEQ ID NO:240, SEQ ID NO:241, SEQ ID NO:242, SEQ ID NO:243, SEQ ID NO:244, SEQ ID NO:245, SEQ ID NO:246, SEQ ID NO:247, SEQ ID NO:248, SEQ ID NO:249, SEQ ID NO:250, SEQ ID NO:251, SEQ ID NO:252, SEQ ID NO:253, SEQ ID NO:254, SEQ ID NO:255, SEQ ID NO:256, SEQ ID NO:257, SEQ ID NO:258, SEQ ID NO:259, SEQ ID NO:260, SEQ ID NO:261, SEQ ID NO:262, SEQ ID NO:263, SEQ ID NO:264, SEQ ID NO:265, SEQ ID NO:266, SEQ ID NO:267, SEQ ID NO:268, SEQ ID NO:269, SEQ ID NO:270, SEQ ID NO:271, SEQ ID NO:272, SEQ ID NO:273, SEQ ID NO:274, SEQ ID NO:275, SEQ ID NO:276, SEQ ID NO:277, SEQ ID NO:278, SEQ ID NO:279, SEQ ID NO:280, SEQ ID NO:281, SEQ ID NO:282, SEQ ID NO:283, SEQ ID NO:284, SEQ ID NO:285, SEQ ID NO:286, SEQ ID NO:287, SEQ ID NO:288, SEQ ID NO:289, SEQ ID NO:290, SEQ ID NO:291, SEQ ID NO:292, SEQ ID NO:293, SEQ ID NO:294, SEQ ID NO:295, SEQ ID NO:296, SEQ ID NO:297, SEQ ID NO:298, SEQ ID NO:299, SEQ ID NO:300, SEQ ID NO:301, SEQ ID NO:302, SEQ ID NO:303, SEQ ID NO:304, SEQ ID NO:305, SEQ ID NO:306, SEQ ID NO:307, SEQ ID NO:308, SEQ ID NO:309, SEQ ID NO:310, SEQ ID NO:311, SE ID NO:312, SEQ ID NO:313, SEQ ID NO:314, SEQ ID NO:315, SEQ ID NO:316, SEQ ID NO:317, SEQ ID NO:318, SEQ ID NO:319, SEQ ID NO:320, SEQ ID NO:321, SEQ ID NO:322, SEQ ID NO:323, SEQ ID NO:324, SEQ ID NO:325, SEQ ID NO:326, SEQ ID NO:327, SEQ D NO:328, SEQ ID NO:329, SEQ ID NO:330, SEQ ID NO:331, SEQ ID NO:332, SEQ ID NO:333, SEQ ID NO:334, SEQ ID NO:335, SEQ ID NO:336, SEQ ID NO:337, SEQ ID NO:338, SEQ ID NO:339, SEQ ID NO:340, SEQ ID NO:341, SEQ ID NO:342, SEQ ID NO:343, SEQ ID NO:344, SEQ ID NO:345, SEQ ID NO:346, SEQ ID NO:347, SEQ ID NO:348, SEQ ID NO:349, SEQ ID NO:350, SEQ ID NO:351, SEQ ID NO:352, SEQ ID NO:353, SEQ ID NO:354, SEQ ID NO:355, SEQ ID NO:356, SEQ ID NO:357, SEQ ID NO:358, SEQ ID NO:359, SEQ ID NO:360, SEQ ID NO:361, SEQ ID NO:362, SEQ ID NO:363, SEQ ID NO:364, SEQ ID NO:365, SEQ ID NO:366, SEQ ID NO:367, SEQ ID NO:368, SEQ ID NO:369, SEQ ID NO:370, SEQ ID NO:371, SEQ ID NO:372, SEQ ID NO:373, SEQ ID NO:374, SEQ ID NO:375, SEQ ID NO:376, SEQ ID NO:377, SEQ ID NO:378, SEQ ID NO:379, SEQ ID NO:380, SEQ ID NO:381, SEQ ID NO:382, SEQ ID NO:383, SEQ ID NO:384, SEQ ID NO:385, SEQ ID NO:386, SEQ ID NO:387, SEQ ID NO:388, SEQ ID NO:389, SEQ ID NO:390, SEQ ID NO:391, SEQ ID NO:392, SEQ ID NO:393, SEQ ID NO:394, SEQ ID NO:395, SEQ ID NO:396, SEQ ID NO:397, SEQ ID NO:398, SEQ ID NO:399, SEQ ID NO:400, SEQ ID NO:401, SEQ ID NO:402, SEQ ID NO:403, SEQ ID NO:404, SEQ ID NO:405, SEQ ID NO:406, SEQ ID NO:407, SEQ ID NO:408, SEQ ID NO:409, SEQ ID NO:410, SEQ ID NO:411, SEQ ID NO:412, SEQ ID NO:413, SEQ ID NO:414, SEQ ID NO:415, SEQ ID NO:416, SEQ ID NO:417, SEQ ID NO:418, SEQ ID NO:419, SEQ ID NO:420, SEQ ID NO:421, SEQ ID NO:422, SEQ ID NO:423, SEQ ID NO:424, SEQ ID NO:425, SEQ ID NO:426, SEQ ID NO:427, SEQ ID NO:428, SEQ ID NO:429, SEQ ID NO:430, SEQ ID NO:431, SEQ ID NO:432, SEQ ID NO:433, SEQ ID NO:434, SEQ ID NO:435, SEQ ID NO:436, SEQ ID NO:437, SEQ ID NO:438, SEQ ID NO:439, SEQ ID NO:440, SEQ ID NO:441, SEQ ID NO:442, SEQ ID NO:443, SEQ ID NO:444, SEQ ID NO:445, SEQ ID NO:446, SEQ ID NO:447, SEQ ID NO:448, SEQ ID NO:449, SEQ ID NO:450, SEQ ID NO:451, SEQ ID NO:452, SEQ ID NO:453, SEQ ID NO:454, SEQ ID NO:455, SEQ ID NO:456, SEQ ID NO:457, SEQ ID NO:458, SEQ ID NO:459, SEQ ID NO:460, SEQ ID NO:461, SEQ ID NO:462, SEQ ID NO:463, SEQ ID NO:464, SEQ ID NO:465, SEQ ID NO:466, SEQ ID NO:467, SEQ ID NO:468, SEQ ID NO:469, SEQ ID NO:470, SEQ ID NO:471, SEQ ID NO:472, SEQ ID NO:473, SEQ ID NO:474, SEQ ID NO:475, SEQ ID NO:476, SEQ ID NO:477, SEQ ID NO:478, SEQ ID NO:479, SEQ ID NO:487, SEQ ID NO:481, SEQ ID NO:482, SEQ ID NO:483, SEQ ID NO:484, SEQ ID NO:485, SEQ ID NO:486, SEQ ID NO:487, SEQ ID NO:488, SEQ ID NO:489, SEQ ID NO:490, SEQ ID NO:491, SEQ ID NO:492, SEQ ID NO:493, SEQ ID NO:494, SEQ ID NO:495, SEQ ID NO:496, SEQ ID NO:497, SEQ ID NO:498, SEQ ID NO:499, SEQ ID NO:500, SEQ ID NO:501, SEQ ID NO:502, SEQ ID NO:503, SEQ ID NO:504, SEQ ID NO:505, SEQ ID NO:546, SEQ ID NO:507, SEQ ID NO:508, SEQ ID NO:509, SEQ ID NO:510, SEQ ID NO:511, SEQ ID NO:512, SEQ ID NO:513, SEQ ID NO:514, SEQ ID NO:515, SEQ ID NO:516, SEQ ID NO:517, SEQ ID NO:518, SEQ ID NO:519, SEQ ID NO:520, SEQ ID NO:521, SEQ ID NO:522, SEQ ID NO:523, SEQ ID NO:524, SEQ ID NO:525, SEQ ID NO:526, SEQ ID NO:527, SEQ ID NO:528, SEQ ID NO:529, SEQ ID NO:530, SEQ ID NO:531, SEQ ID NO:532, SEQ ID NO:533, SEQ ID NO:534, SEQ ID NO:535, SEQ ID NO:536, SEQ ID NO:537, SEQ ID NO:538, SEQ ID NO:539, SEQ ID NO:540, SEQ ID NO:541, SEQ ID NO:542, SEQ ID NO:543, SEQ ID NO:544, SEQ ID NO:545, SEQ ID NO:546, SEQ ID NO:547, SEQ ID NO:548, SEQ ID NO:549, SEQ ID NO:550, SEQ ID NO:551, SEQ ID NO:552, SEQ ID NO:553, SEQ ID NO:554, SEQ ID NO:555, SEQ ID NO:556, SEQ ID NO:557, SEQ ID NO:558, SEQ ID NO:559, SEQ ID NO:560, SEQ ID NO:561, SEQ ID NO:562, SEQ ID NO:563, SEQ ID NO:564, SEQ ID NO:565, SEQ ID NO:566, SEQ ID NO:567, SEQ ID NO:568, SEQ ID NO:569, SEQ ID NO:570, SEQ ID NO:571, SEQ ID NO:572, SEQ ID NO:573, SEQ ID NO:574, SEQ ID NO:575, SEQ ID NO:576, SEQ ID NO:577, SEQ ID NO:578, SEQ ID NO:579, SEQ ID NO:580, SEQ ID NO:581, SEQ ID NO:582, SEQ ID NO:583, SEQ ID NO:584, SEQ ID NO:585, SEQ ID NO:586, SEQ ID NO:587, SEQ ID NO:588, SEQ ID NO:589, SEQ ID NO:590, SEQ ID NO:591, SEQ ID NO:592, SEQ ID NO:593, SEQ ID NO:594, SEQ ID NO:595, SEQ ID NO:596, SEQ ID NO:597, SEQ ID NO:598, SEQ ID NO:599, SEQ ID NO:600, SEQ ID NO:601, SEQ ID NO:602, SEQ ID NO:603, SEQ ID NO:604, SEQ ID NO:605, SEQ ID NO:606, SEQ ID NO:607, SEQ ID NO:608, SEQ ID NO:609, SEQ ID NO:610, SEQ ID NO:611, SEQ ID NO:612, SEQ ID NO:613, SEQ ID NO:614, SEQ ID NO:615, SEQ ID NO:616, SEQ ID NO:617, SEQ ID NO:618, SEQ ID NO:619, SEQ ID NO:620, SEQ ID NO:621, SEQ ID NO:622, SEQ ID NO:623, SEQ ID NO:624, SEQ ID NO:625;

[0011] or a complement of said sequence.

[0012] In other embodiments, the present invention provides an isolated polynucleotide consisting of a nucleotide sequence selected from the group consisting of:

[0013] SEQ ID NO:1, SEQ ID NO:2, SEQ ID NO:3, SEQ ID NO:4, SEQ ID NO:5, SEQ ID NO:6, SEQ ID NO:7, SEQ ID NO:8, SEQ ID NO:9, SEQ ID NO:10, SEQ ID NO:11, SEQ ID NO:12, SEQ ID NO:13, SEQ ID NO:14, SEQ ID NO:15, SEQ ID NO:16, SEQ ID NO:17, SEQ ID NO:18, SEQ ID NO:19, SEQ ID NO:20, SEQ ID NO:21, SEQ ID NO:22, SEQ ID NO:23, SEQ ID NO:24, SEQ ID NO:25, SEQ ID NO:26, SEQ ID NO:27, SEQ ID NO:28, SEQ ID NO:29, SEQ ID NO:30, SEQ ID NO:31, SEQ ID NO:32, SEQ ID NO:33, SEQ ID NO:34, SEQ ID NO:35, SEQ ID NO:36, SEQ ID NO:37, SEQ ID NO:38, SEQ ID NO:39, SEQ ID NO:40, SEQ ID NO:41, SEQ ID NO:42, SEQ ID NO:43, SEQ ID NO:44, SEQ ID NO:45, SEQ ID NO:46, SEQ ID NO:47, SEQ ID NO:48, SEQ ID NO:49, SEQ ID NO:50, SEQ ID NO:51, SEQ ID NO:52, SEQ ID NO:53, SEQ ID NO:54, SEQ ID NO:55, SEQ ID NO:56, SEQ ID NO:57, SEQ ID NO:58, SEQ ID NO:59, SEQ ID NO:60, SEQ ID NO:61, SEQ ID NO:62, SEQ ID NO:63, SEQ ID NO:64, SEQ ID NO:65, SEQ ID NO:66, SEQ ID NO:67, SEQ ID NO:68, SEQ ID NO:69, SEQ ID NO:70, SEQ ID NO:71, SEQ ID NO:72, SEQ ID NO:73, SEQ ID NO:74, SEQ ID NO:75, SEQ ID NO:76, SEQ ID NO:77, SEQ ID NO:78, SEQ ID NO:79, SEQ ID NO:80, SEQ ID NO:81, SEQ ID NO:82, SEQ ID NO:83, SEQ ID NO:84, SEQ ID NO:85, SEQ ID NO:86, SEQ ID NO:87, SEQ ID NO:88, SEQ ID NO:89, SEQ ID NO:90, SEQ ID NO:91, SEQ ID NO:92, SEQ ID NO:93, SEQ ID NO:94, SEQ ID NO:95, SEQ ID NO:96, SEQ ID NO:97, SEQ ID NO:98, SEQ ID NO:99, SEQ ID NO:100, SEQ ID NO:101, SEQ ID NO:102, SEQ ID NO:103, SEQ ID NO:104, SEQ ID NO:105, SEQ ID NO:106, SEQ ID NO:107, SEQ ID NO:108, SEQ ID NO:109, SEQ ID NO:110, SEQ ID NO:111, SEQ ID NO:112, SEQ ID NO:113, SEQ ID NO:114, SEQ ID NO:115, SEQ ID NO:116, SEQ ID NO:117, SEQ ID NO:118, SEQ ID NO:119, SEQ ID NO:120, SEQ ID NO:121, SEQ ID NO:122, SEQ ID NO:123, SEQ ID NO:124, SEQ ID NO:125, SEQ ID NO:126, SEQ ID NO:127, SEQ ID NO:128, SEQ ID NO:129, SEQ ID NO:130, SEQ ID NO:131, SEQ ID NO:132, SEQ ID NO:133, SEQ ID NO:134, SEQ ID NO:135, SEQ ID NO:136, SEQ ID NO:137, SEQ ID NO:138, SEQ ID NO:139, SEQ ID NO:140, SEQ ID NO:141, SEQ ID NO:142, SEQ ID NO:143, SEQ ID NO:144, SEQ ID NO:145, SEQ ID NO:146, SEQ ID NO:147, SEQ ID NO:148, SEQ ID NO:149, SEQ ID NO:150, SEQ ID NO:151, SEQ ID NO:152, SEQ ID NO:153, SEQ ID NO:154, SEQ ID NO:155, SEQ ID NO:156, SEQ ID NO:157, SEQ ID NO:158, SEQ ID NO:159, SEQ ID NO:160, SEQ ID NO:161, SEQ ID NO:162, SEQ ID NO:163, SEQ ID NO:164, SEQ ID NO:165, SEQ ID NO:166, SEQ ID NO:167, SEQ ID NO:168, SEQ ID NO:169, SEQ ID NO:170, SEQ ID NO:171, SEQ ID NO:172, SEQ ID NO:173, SEQ ID NO:174, SEQ ID NO:175, SEQ ID NO:176, SEQ ID NO:177, SEQ ID NO:178, SEQ ID NO:179, SEQ ID NO:180, SEQ ID NO:181, SEQ ID NO:182, SEQ ID NO:183, SEQ ID NO:184, SEQ ID NO:185, SEQ ID NO:186, SEQ ID NO:187, SEQ ID NO:188, SEQ ID NO:189, SEQ ID NO:190, SEQ ID NO:191, SEQ ID NO:192, SEQ ID NO:193, SEQ ID NO:194, SEQ ID NO:195, SEQ ID NO:196, SEQ ID NO:197, SEQ ID NO:198, SEQ ID NO:199, SEQ ID NO:200, SEQ ID NO:201, SEQ ID NO:202, SEQ ID NO:203, SEQ ID NO:204, SEQ ID NO:205, SEQ ID NO:206, SEQ ID NO:207, SEQ ID NO:208, SEQ ID NO:209, SEQ ID NO:210, SEQ ID NO:211, SEQ ID NO:212, SEQ ID NO:213, SEQ ID NO:214, SEQ ID NO:215, SEQ ID NO:216, SEQ ID NO:217, SEQ ID NO:218, SEQ ID NO:219, SEQ ID NO:220, SEQ ID NO:221, SEQ ID NO:222, SEQ ID NO:223, SEQ ID NO:224, SEQ ID NO:225, SEQ ID NO:226, SEQ ID NO:227, SEQ ID NO:228, SEQ ID NO:229, SEQ ID NO:230, SEQ ID NO:231, SEQ ID NO:232, SEQ ID NO:233, SEQ ID NO:234, SEQ ID NO:235, SEQ ID NO:236, SEQ ID NO:237, SEQ ID NO:238, SEQ ID NO:239, SEQ ID NO:240, SEQ ID NO:241, SEQ ID NO:242, SEQ ID NO:243, SEQ ID NO:244, SEQ ID NO:245: SEQ ID NO:246, SEQ ID NO:247, SEQ ID NO:248, SEQ ID NO:249, SEQ ID NO:250, SEQ ID NO:251, SEQ ID NO:252, SEQ ID NO:253, SEQ ID NO:254, SEQ ID NO:255, SEQ ID NO:256, SEQ ID NO:257, SEQ ID NO:258, SEQ ID NO:259, SEQ ID NO:260, SEQ ID NO:261, SEQ ID NO:262, SEQ ID NO:263, SEQ ID NO:264, SEQ ID NO:265, SEQ ID NO:266, SEQ ID NO:267, SEQ ID NO:268, SEQ ID NO:269, SEQ ID NO:270, SEQ ID NO:271, SEQ ID NO:272, SEQ ID NO:273, SEQ ID NO:274, SEQ ID NO:275, SEQ ID NO:276, SEQ ID NO:277, SEQ ID NO:278, SEQ ID NO:279, SEQ ID NO:280, SEQ ID NO:281, SEQ ID NO:282, SEQ ID NO:283, SEQ ID NO:284, SEQ ID NO:285, SEQ ID NO:286, SEQ ID NO:287, SEQ ID NO:288, SEQ ID NO:289, SEQ ID NO:290, SEQ ID NO:291, SEQ ID NO:292, SEQ ID NO:293, SEQ ID NO:294, SEQ ID NO:295, SEQ ID NO:296, SEQ ID NO:297, SEQ ID NO:298, SEQ ID NO:299, SEQ ID NO:300, SEQ ID NO:301, SEQ ID NO:302, SEQ ID NO:303, SEQ ID NO:304, SEQ ID NO:305, SEQ ID NO:306, SEQ ID NO:307, SEQ ID NO:308, SEQ ID NO:309, SEQ ID NO:310, SEQ ID NO:311, SEQ ID NO:312, SEQ ID NO:313, SEQ ID NO:314, SEQ ID NO:315, SEQ ID NO:316, SEQ ID NO:317, SEQ ID NO:318, SEQ ID NO:319, SEQ ID NO:320, SEQ ID NO:321, SEQ ID NO:322, SEQ ID NO:323, SEQ ID NO:324, SEQ ID NO:325, SEQ ID NO:326, SEQ ID NO:327, SEQ ID NO:328, SEQ ID NO:329, SEQ ID NO:330, SEQ ID NO:331, SEQ ID NO:332, SEQ ID NO:333, SEQ ID NO:334, SEQ ID NO:335, SEQ ID NO:336, SEQ ID NO:337, SEQ ID NO:338, SEQ ID NO:339, SEQ ID NO:340, SEQ ID NO:341, SEQ ID NO:342, SEQ ID NO:343, SEQ ID NO:344, SEQ ID NO:345, SEQ ID NO:346, SEQ ID NO:347, SEQ ID NO:348, SEQ ID NO:349, SEQ ID NO:350, SEQ ID NO:351, SEQ ID NO:352, SEQ ID NO:353, SEQ ID NO:354, SEQ ID NO:355, SEQ ID NO:356, SEQ ID NO:357, SEQ ID NO:358, SEQ ID NO:359, SEQ ID NO:360, SEQ ID NO:361, SEQ ID NO:362, SEQ ID NO:363, SEQ ID NO:364, SEQ ID NO:365, SEQ ID NO:366, SEQ ID NO:367, SEQ ID NO:368, SEQ ID NO:369, SEQ ID NO:370, SEQ ID NO:371, SEQ ID NO:372, SEQ ID NO:373, SEQ ID NO:374, SEQ ID NO:375, SEQ ID NO:376, SEQ ID NO:377, SEQ ID NO:378, SEQ ID NO:379, SEQ ID NO:380, SEQ ID NO:381, SEQ ID NO:.82, SEQ ID NO:383, SEQ ID NO:384, SEQ ID NO:385, SEQ ID NO:386, SEQ ID NO:387, SEQ ID NO:388, SEQ ID NO:389, SEQ ID NO:390, SEQ ID NO:391, SEQ ID NO:392, SEQ ID NO:393, SEQ ID NO:394, SEQ ID NO:395, SEQ ID NO:396, SEQ ID NO:397, SEQ ID NO:398, SEQ ID NO:399, SEQ ID NO:400, SEQ ID NO:401, SEQ ID NO:402, SEQ ID NO:403, SEQ ID NO:404, SEQ ID NO:405, SEQ ID NO:406, SEQ ID NO:407, SEQ ID NO:408, SEQ ID NO:409, SEQ ID NO:410, SEQ ID NO:411, SEQ ID NO:412, SEQ ID NO:413, SEQ ID NO:414, SEQ ID NO:415, SEQ ID NO:416, SEQ ID NO:417, SEQ ID NO:418, SEQ ID NO:419, SEQ ID NO:420, SEQ ID NO:421, SEQ ID NO:422, SEQ ID NO:423, SEQ ID NO:424, SEQ ID NO:425, SEQ ID NO:426, SEQ ID NO:427, SEQ ID NO:428, SEQ ID NO:429, SEQ ID NO:430, SEQ ID NO:431, SEQ ID NO:432, SEQ ID NO:433, SEQ ID NO:434, SEQ ID NO:435, SEQ ID NO:436, SEQ ID NO:437, SEQ ID NO:438, SEQ ID NO:439, SEQ ID NO:440, SEQ ID NO:441, SEQ ID NO:442, SEQ ID NO:443, SEQ ID NO:444, SEQ ID NO:445, SEQ ID NO:446, SEQ ID NO:447, SEQ ID NO:448, SEQ ID NO:449, SEQ ID NO:450, SEQ ID NO:451, SEQ ID NO:452, SEQ ID NO:453, SEQ ID NO:454, SEQ ID NO:455, SEQ ID NO:456, SEQ ID NO:457, SEQ ID NO:458, SEQ ID NO:459, SEQ ID NO:460, SEQ ID NO:461, SEQ ID NO:462, SEQ ID NO:463, SEQ ID NO:464, SEQ ID NO:465, SEQ ID NO:466, SEQ ID NO:467, SEQ ID NO:468, SEQ ID NO:469, SEQ ID NO:470, SEQ ID NO:471, SEQ ID NO:472, SEQ ID NO:473, SEQ ID NO:474, SEQ ID NO:475, SEQ ID NO:476, SEQ ID NO:477, SEQ ID NO:478, SEQ ID NO:479, SEQ ID NO:480, SEQ ID NO:481, SEQ ID NO:482, SEQ ID NO:483, SEQ ID NO:484, SEQ ID NO:485, SEQ ID NO:486, SEQ ID NO:487, SEQ ID NO:488, SEQ ID NO:489, SEQ ID NO:490, SEQ ID NO:491, SEQ ID NO:492, SEQ ID NO:493, SEQ ID NO:494, SEQ ID NO:495, SEQ ID NO:496, SEQ ID NO:497, SEQ ID NO:498, SEQ ID NO:499, SEQ ID NO:500, SEQ ID NO:501, SEQ ID NO:502, SEQ ID NO:503, SEQ ID NO:504, SEQ ID NO:505, SEQ ID NO:506, SEQ ID NO:507, SEQ ID NO:508, SEQ ID NO:509, SEQ ID NO:510, SEQ ID NO:511, SEQ ID NO:512, SEQ ID NO:513, SEQ ID NO:514, SEQ ID NO:515, SEQ ID NO:516, SEQ ID NO:517, SEQ ID NO:518, SEQ ID NO:519, SEQ ID NO:520, SEQ ID NO:521, SEQ ID NO:522, SEQ ID NO:523, SEQ ID NO:524, SEQ ID NO:525, SEQ ID NO:526, SEQ ID NO:527, SEQ ID NO:528, SEQ ID NO:529, SEQ ID NO:530, SEQ ID NO:531, SEQ ID NO:532, SEQ ID NO:533, SEQ ID NO:534, SEQ ID NO:535, SEQ ID NO:536, SEQ ID NO:537, SEQ ID NO:538, SEQ ID NO:539, SEQ ID NO:540, SEQ ID NO:541, SEQ ID NO:542, SEQ ID NO:543, SEQ ID NO:544, SEQ ID NO:545, SEQ ID NO:546, SEQ ID NO:547, SEQ ID NO:548, SEQ ID NO:549, SEQ ID NO:550, SEQ ID NO:551, SEQ ID NO:552, SEQ ID NO:553, SEQ ID NO:554, SEQ ID NO:555 , SEQ ID NO:556, SEQ ID NO:557, SEQ ID NO:558, SEQ ID NO:559, SEQ ID NO:560, SEQ ID NO:561, SEQ ID NO:562, SEQ ID NO:563, SEQ ID NO:564, SEQ ID NO:565, SEQ ID NO:566, SEQ ID NO:567, SEQ ID NO:568, SEQ ID NO:569, SEQ ID NO:570, SEQ ID NO:571, SEQ ID NO:572, SEQ ID NO:573, SEQ ID NO:574, SEQ ID NO:575, SEQ ID NO:576, SEQ ID NO:577, SEQ ID NO:578, SEQ ID NO:579, SEQ ID NO:580, SEQ ID NO:581, SEQ ID NO:582, SEQ ID NO:583, SEQ ID NO:584, SEQ ID NO:585, SEQ ID NO:586, SEQ ID NO:587, SEQ ID NO:588, SEQ ID NO:589, SEQ ID NO:590, SEQ ID NO:591, SEQ ID NO:592, SEQ ID NO:593, SEQ ID NO:594, SEQ ID NO:595, SEQ ID NO:596, SEQ ID NO:597, SEQ ID NO:598, SEQ ID NO:599, SEQ ID NO:600, SEQ ID NO:601, SEQ ID NO:602, SEQ ID NO:603, SEQ ID NO:604, SEQ ID NO:605, SEQ ID NO:606, SEQ ID NO:607, SEQ ID NO:608, SEQ ID NO:609, SEQ ID NO:610, SEQ ID NO:611, SEQ ID NO:612, SEQ ID NO:613, SEQ ID NO:614, SEQ ID NO:615, SEQ ID NO:616, SEQ ID NO:617, SEQ ID NO:618, SEQ ID NO:619, SEQ ID NO:620, SEQ ID NO:621, SEQ ID NO:622, SEQ ID NO:623, SEQ ID NO:624, SEQ ID NO:625;

[0014] or a complement of said sequence.

[0015] In further embodiments, the present invention provides an isolated polynucleotide consisting essentially of a nucleotide sequence selected from the group consisting of:

[0016] SEQ ID NO:1, SEQ ID NO:2, SEQ ID NO:3, SEQ ID NO:4, SEQ ID NO:5, SEQ ID NO:6, SEQ ID NO:7, SEQ ID NO:8, SEQ ID NO:9, SEQ ID NO:10, SEQ ID NO:11, SEQ ID NO:12, SEQ ID NO:13, SEQ ID NO:14, SEQ ID NO:15, SEQ ID NO:16, SEQ ID NO:17, SEQ ID NO:18, SEQ ID NO:19, SEQ ID NO:20, SEQ ID NO:21, SEQ ID NO:22, SEQ ID NO:23, SEQ ID NO:24, SEQ ID NO:25, SEQ ID NO:26, SEQ ID NO:27, SEQ ID NO:28, SEQ ID NO:29, SEQ ID NO:30, SEQ ID NO:31, SEQ ID NO:32, SEQ ID NO:33, SEQ ID NO:34, SEQ ID NO:35, SEQ ID NO:36, SEQ ID NO:37, SEQ ID NO:38, SEQ ID NO:39, SEQ ID NO:40, SEQ ID NO:41, SEQ ID NO:42, SEQ ID NO:43, SEQ ID NO:44, SEQ ID NO:45, SEQ ID NO:46, SEQ ID NO:47, SEQ ID NO:48, SEQ ID NO:49, SEQ ID NO:50, SEQ ID NO:51, SEQ ID NO:52, SEQ ID NO:53, SEQ ID NO:54, SEQ ID NO:55, SEQ ID NO:56, SEQ ID NO:57, SEQ ID NO:58, SEQ ID NO:59, SEQ ID NO:60, SEQ ID NO:61, SEQ ID NO:62, SEQ ID NO:63, SEQ ID NO:64, SEQ ID NO:65, SEQ ID NO:66, SEQ ID NO:67, SEQ ID NO:68, SEQ ID NO:69, SEQ ID NO:70, SEQ ID NO:71, SEQ ID NO:72, SEQ ID NO:73, SEQ ID NO:74, SEQ ID NO:75, SEQ ID NO:76, SEQ ID NO:77, SEQ ID NO:78, SEQ ID NO:79, SEQ ID NO:80, SEQ ID NO:81, SEQ ID NO:82, SEQ ID NO:83, SEQ ID NO:84, SEQ ID NO:85, SEQ ID NO:86, SEQ ID NO:87, SEQ ID NO:88, SEQ ID NO:89, SEQ ID NO:90, SEQ ID NO:91, SEQ ID NO:92, SEQ ID NO:93, SEQ ID NO:94, SEQ ID NO:95, SEQ ID NO:96, SEQ ID NO:97, SEQ ID NO:98, SEQ ID NO:99, SEQ ID NO:100, SEQ ID NO:101, SEQ ID NO:102, SEQ ID NO:103, SEQ ID NO:104, SEQ ID NO:105, SEQ ID NO:106, SEQ ID NO:107, SEQ ID NO:108, SEQ ID NO:109, SEQ ID NO:110, SEQ ID NO:111, SEQ ID NO:112, SEQ ID NO:113, SEQ ID NO:114, SEQ ID NO:115, SEQ ID NO:116, SEQ ID NO:117, SEQ ID NO:118, SEQ ID NO:119, SEQ ID NO:120, SEQ ID NO:121, SEQ ID NO:122, SEQ ID NO:123, SEQ ID NO:124, SEQ ID NO:125, SEQ ID NO:126, SEQ ID NO:127, SEQ ID NO:128, SEQ ID NO:129, SEQ ID NO:130, SEQ ID NO:131, SEQ ID NO:132, SEQ ID NO:133, SEQ ID NO:134, SEQ ID NO:135, SEQ ID NO:136, SEQ ID NO:137, SEQ ID NO:138, SEQ ID NO:139, SEQ ID NO:140, SEQ ID NO:141, SEQ ID NO:142, SEQ ID NO:143, SEQ ID NO:144, SEQ ID NO:145, SEQ ID NO:146, SEQ ID NO:147, SEQ ID NO:148, SEQ ID NO:149, SEQ ID NO:150, SEQ ID NO:151, SEQ ID NO:152, SEQ ID NO:153, SEQ ID NO:154, SEQ ID NO:155, SEQ ID NO:156, SEQ ID NO:157, SEQ ID NO:158, SEQ ID NO:159, SEQ ID NO:160, SEQ ID NO:161, SEQ ID NO:162, SEQ ID NO:163, SEQ ID NO:164, SEQ ID NO:165, SEQ ID NO:166, SEQ ID NO:167, SEQ ID NO:168, SEQ ID NO:169, SEQ ID NO:170, SEQ ID NO:171, SEQ ID NO:172, SEQ ID NO:173, SEQ ID NO:174, SEQ ID NO:175, SEQ ID NO:176, SEQ ID NO:177, SEQ ID NO:178, SEQ ID NO:179, SEQ ID NO:180, SEQ ID NO:181, SEQ ID NO:182, SEQ ID NO:183, SEQ ID NO:184, SEQ ID NO:185, SEQ ID NO:186, SEQ ID NO:187, SEQ ID NO:188, SEQ ID NO:189, SEQ ID NO:190, SEQ ID NO:191, SEQ ID NO:192, SEQ ID NO:193, SEQ ID NO:194, SEQ ID NO:195, SEQ ID NO:196, SEQ ID NO:197, SEQ ID NO:198, SEQ ID NO:199, SEQ ID NO:200, SEQ ID NO:201, SEQ ID NO:202, SEQ ID NO:203, SEQ ID NO:204, SEQ ID NO:205, SEQ ID NO:206, SEQ ID NO:207, SEQ ID NO:208, SEQ ID NO:209, SEQ ID NO:210, SEQ ID NO:211, SEQ ID NO:212, SEQ ID NO:213, SEQ ID NO:214, SEQ ID NO:215, SEQ ID NO:216, SEQ ID NO:217, SEQ ID NO:218, SEQ ID NO:219, SEQ ID NO:220, SEQ ID NO:221, SEQ ID NO:222, SEQ ID NO:223, SEQ ID NO:224, SEQ ID NO:225, SEQ ID NO:226, SEQ ID NO:227, SEQ ID NO:228, SEQ ID NO:229, SEQ ID NO:230, SEQ ID NO:231, SEQ ID NO:232, SEQ ID NO:233, SEQ ID NO:234, SEQ ID NO:235, SEQ ID NO:236, SEQ ID NO:237, SEQ ID NO:238, SEQ ID NO:239, SEQ ID NO:240, SEQ ID NO:241, SEQ ID NO:242, SEQ ID NO:243, SEQ ID NO:244, SEQ ID NO:245, SEQ ID NO:246, SEQ ID NO:247, SEQ ID NO:248, SEQ ID NO:249, SEQ ID NO:250, SEQ ID NO:251, SEQ ID NO:252, SEQ ID NO:253, SEQ ID NO:254, SEQ ID NO:255, SEQ ID NO:256, SEQ ID NO:257, SEQ ID NO:258, SEQ ID NO:259, SEQ ID NO:260, SEQ ID NO:261, SEQ ID NO:262, SEQ ID NO:263, SEQ ID NO:264, SEQ ID NO:265, SEQ ID NO:266, SEQ ID NO:267, SEQ ID NO:268, SEQ ID NO:269, SEQ ID NO:270, SEQ ID NO:271, SEQ ID NO:272, SEQ ID NO:273, SEQ ID NO:274, SEQ ID NO:275, SEQ ID NO:276, SEQ ID NO:277, SEQ ID NO:278, SEQ ID NO:279, SEQ ID NO:280, SEQ ID NO:281, SEQ ID NO:282, SEQ ID NO:283, SEQ ID NO:284, SEQ ID NO:285, SEQ ID NO:286, SEQ ID NO:287, SEQ ID NO:288, SEQ ID NO:289, SEQ ID NO:290, SEQ ID NO:291, SEQ ID NO:292, SEQ ID NO:293, SEQ ID NO:294, SEQ ID NO:295, SEQ ID NO:296, SEQ ID NO:297, SEQ ID NO:298, SEQ ID NO:299, SEQ ID NO:300, SEQ ID NO:301, SEQ ID NO:302, SEQ ID NO:303, SEQ ID NO:304, SEQ ID NO:305, SEQ ID NO:306, SEQ ID NO:307, SEQ ID NO:308, SEQ ID NO:309, SEQ ID NO:310, SEQ ID NO:311, SEQ ID NO:312, SEQ ID NO:313, SEQ ID NO:314, SEQ ID NO:315, SEQ ID NO:316, SEQ ID NO:317, SEQ ID NO:318, SEQ ID NO:319, SEQ ID NO:320, SEQ ID NO:321, SEQ ID NO:322, SEQ ID NO:323, SEQ ID NO:324, SEQ ID NO:325, SEQ ID NO:326, SEQ ID NO:327, SEQ ID NO:328, SEQ ID NO:329, SEQ ID NO:330, SEQ ID NO:331, SEQ ID NO:332, SEQ ID NO:333, SEQ ID NO:334, SEQ ID NO:335, SEQ ID NO:336, SEQ ID NO:337, SEQ ID NO:338, SEQ ID NO:339, SEQ ID NO:340, SEQ ID NO:341, SEQ ID NO:342, SEQ ID NO:343, SEQ ID NO:344, SEQ ID NO:345, SEQ ID NO:346, SEQ ID NO:347, SEQ ID NO:348, SEQ ID NO:349, SEQ ID NO:350, SEQ ID NO:351, SEQ ID NO:352, SEQ ID NO:353, SEQ ID NO:354, SEQ ID NO:355, SEQ ID NO:356, SEQ ID NO:357, SEQ ID NO:358, SEQ ID NO:359, SEQ ID NO:360, SEQ ID NO:361, SEQ ID NO:362, SEQ ID NO:363, SEQ ID NO:364, SEQ ID NO:365, SEQ ID NO:366, SEQ ID NO:367, SEQ ID NO:368, SEQ ID NO:369, SEQ ID NO:370, SEQ ID NO:371, SEQ ID NO:372, SEQ ID NO:373, SEQ ID NO:374, SEQ ID NO:375, SEQ ID NO:376, SEQ ID NO:377, SEQ ID NO:378, SEQ ID NO:379, SEQ ID NO:380, SEQ ID NO:381, SEQ ID NO:382, SEQ ID NO:383, SEQ ID NO:384, SEQ ID NO:385, SEQ ID NO:386, SEQ ID NO:387, SEQ ID NO:388, SEQ ID NO:389, SEQ ID NO:390, SEQ ID NO:391, SEQ ID NO:392, SEQ ID NO:393, SEQ ID NO:394, SEQ ID NO:395, SEQ ID NO:396, SEQ ID NO:397, SEQ ID NO:398, SEQ ID NO:399, SEQ ID NO:400, SEQ ID NO:401, SEQ ID NO:402, SEQ ID NO:403, SEQ ID NO:404, SEQ ID NO:405, SEQ ID NO:406, SEQ ID NO:407, SEQ ID NO:408, SEQ ID NO:409, SEQ ID NO:410, SEQ ID NO:411, SEQ ID NO:412, SEQ ID NO:413, SEQ ID NO:414, SEQ ID NO:415, SEQ ID NO:416, SEQ ID NO:417, SEQ ID NO:418, SEQ ID NO:419, SEQ ID NO:420, SEQ ID NO:421, SEQ ID NO:422, SEQ ID NO:423, SEQ ID NO:424, SEQ ID NO:425, SEQ ID NO:426, SEQ ID NO:427, SEQ ID NO:428, SEQ ID NO:429, SEQ ID NO:430, SEQ ID NO:431, SEQ ID NO:432, SEQ ID NO:433, SEQ ID NO:434, SEQ ID NO:435, SEQ ID NO:436, SEQ ID NO:437, SEQ ID NO:438, SEQ ID NO:439, SEQ ID NO:440, SEQ ID NO:441, SEQ ID NO:442, SEQ ID NO:443, SEQ ID NO:444, SEQ ID NO:445, SEQ ID NO:446, SEQ ID NO:447, SEQ ID NO:448, SEQ ID NO:449, SEQ ID NO:450, SEQ ID NO:451, SEQ ID NO:452, SEQ ID NO:453, SEQ ID NO:454, SEQ ID NO:455, SEQ ID NO:456, SEQ ID NO:457, SEQ ID NO:458, SEQ ID NO:459, SEQ ID NO:460, SEQ ID NO:461, SEQ ID NO:462, SEQ ID NO:463, SEQ ID NO:464, SEQ ID NO:465, SEQ ID NO:466, SEQ ID NO:467, SEQ ID NO:468, SEQ ID NO:469, SEQ ID NO:470, SEQ ID NO:471, SEQ ID NO:472, SEQ ID NO:473, SEQ ID NO:474, SEQ ID NO:475, SEQ ID NO:476, SEQ ID NO:477, SEQ ID NO:478, SEQ ID NO:479, SEQ ID NO:480, SEQ ID NO:481, SEQ ID NO:482, SEQ ID NO:483, SEQ ID NO:484, SEQ ID NO:485, SEQ ID NO:486, SEQ ID NO:487, SEQ ID NO:488, SEQ ID NO:489, SEQ ID NO:490, SEQ ID NO:491, SEQ ID NO:492, SEQ ID NO:493, SEQ ID NO:494, SEQ ID NO:495, SEQ ID NO:496, SEQ ID NO:497, SEQ ID NO:498, SEQ ID NO:499, SEQ ID NO:500, SEQ ID NO:501, SEQ ID NO:502, SEQ ID NO:503, SEQ ID NO:504, SEQ ID NO:505, SEQ ID NO:506, SEQ ID NO:507, SEQ ID NO:508, SEQ ID NO:509, SEQ ID NO:510, SEQ ID NO:511, SEQ ID NO:512, SEQ ID NO:513, SEQ ID NO:514, SEQ ID NO:515, SEQ ID NO:516, SEQ ID NO:517, SEQ ID NO:518, SEQ ID NO:519, SEQ ID NO:520, SEQ ID NO:521, SEQ ID NO:522, SEQ ID NO:523, SEQ ID NO:524, SEQ ID NO:525, SEQ ID NO:526, SEQ ID NO:527, SEQ ID NO:528, SEQ ID NO:529, SEQ ID NO:530, SEQ ID NO:531, SEQ ID NO:532, SEQ ID NO:533, SEQ ID NO:534, SEQ ID NO:535, SEQ ID NO:536, SEQ ID NO:537, SEQ ID NO:538, SEQ ID NO:539, SEQ ID NO:540, SEQ ID NO:541, SEQ ID NO:542, SEQ ID NO:543, SEQ ID NO:544, SEQ ID NO:545, SEQ ID NO:546, SEQ ID NO:547, SEQ ID NO:548, SEQ ID NO:549, SEQ ID NO:550, SEQ ID NO:551, SEQ ID NO:552, SEQ ID NO:553, SEQ ID NO:554, SEQ ID NO:555, SEQ ID NO:556, SEQ ID NO:557, SEQ ID NO:558, SEQ ID NO:559, SEQ ID NO:560, SEQ ID NO:561, SEQ ID NO:562, SEQ ID NO:563, SEQ ID NO:564, SEQ ID NO:565, SEQ ID NO:566, SEQ ID NO:567, SEQ ID NO:568, SEQ ID NO:569, SEQ ID NO:570, SEQ ID NO:571, SEQ ID NO:572, SEQ ID NO:573, SEQ ID NO:574, SEQ ID NO:575, SEQ ID NO:576, SEQ ID NO:577, SEQ ID NO:578, SEQ ID NO:579, SEQ ID NO:580, SEQ ID NO:581, SEQ ID NO:582, SEQ ID NO:583, SEQ ID NO:584, SEQ ID NO:585, SEQ ID NO:586, SEQ ID NO:587, SEQ ID NO:588, SEQ ID NO:589, SEQ ID NO:590, SEQ ID NO:591, SEQ ID NO:592, SEQ ID NO:593, SEQ ID NO:594, SEQ ID NO:595, SEQ ID NO:596, SEQ ID NO:597, SEQ ID NO:598, SEQ ID NO:599, SEQ ID NO:600, SEQ ID NO:601, SEQ ID NO:602, SEQ ID NO:603, SEQ ID NO:604, SEQ ID NO:605, SEQ ID NO:606, SEQ ID NO:607, SEQ ID NO:608, SEQ ID NO:609, SEQ ID NO:610, SEQ ID NO:611, SEQ ID NO:612, oEQ ID NO:613, SEQ ID NO:614, SEQ ID NO:615, SEQ ID NO:616, SEQ ID NO:617, SEQ ID NO:618, SEQ ID NO:619, SEQ ID NO:620, SEQ ID NO:621, SEQ ID NO:622, SEQ ID NO:623, SEQ ID NO:624, SEQ ID NO:625;

[0017] or a complement of said sequence.

[0018] In yet other embodiments, the present invention provides an isolated polynucleotide comprising a nucleotide sequence which hybridizes to a sequence selected from the group consisting of:

[0019] SEQ ID NO:1, SEQ ID NO:2, SEQ ID NO:3, SEQ ID NO:4, SEQ ID NO:5, SEQ ID NO:6, SEQ ID NO:7, SEQ ID NO:8, SEQ ID NO:9, SEQ ID NO:10, SEQ ID NO:11, SEQ ID NO:12, SEQ ID NO:13, SEQ ID NO:14, SEQ ID NO:15, SEQ ID NO:16, SEQ ID NO:17, SEQ ID NO:18, SEQ ID NO:19, SEQ ID NO:20, SEQ ID NO:21, SEQ ID NO:22, SEQ ID NO:23, SEQ ID NO:24, SEQ ID NO:25, SEQ ID NO:26, SEQ ID NO:27, SEQ ID NO:28, SEQ ID NO:29, SEQ ID NO:30, SEQ ID NO:31, SEQ ID NO:32, SEQ ID NO:33, SEQ ID NO:34, SEQ ID NO:35, SEQ ID NO:36, SEQ ID NO:37, SEQ ID NO:38, SEQ ID NO:39, SEQ ID NO:40, SEQ ID NO:41, SEQ ID NO:42, SEQ ID NO:43, SEQ ID NO:44, SEQ ID NO:45, SEQ ID NO:46, SEQ ID NO:47, SEQ ID NO:48, SEQ ID NO:49, SEQ ID NO:50, SEQ ID NO:51, SEQ ID NO:52, SEQ ID NO:53, SEQ ID NO:54, SEQ ID NO:55, SEQ ID NO:56, SEQ ID NO:57, SEQ ID NO:58, SEQ ID NO:59, SEQ ID NO:60, SEQ ID NO:61, SEQ ID NO:62, SEQ ID NO:63, SEQ ID NO:64, SEQ ID NO:65, SEQ ID NO:66, SEQ ID NO:67, SEQ ID NO:68, SEQ ID NO:69, SEQ ID NO:70, SEQ ID NO:71, SEQ ID NO:72, SEQ ID NO:73, SEQ ID NO:74, SEQ ID NO:75, SEQ ID NO:76, SEQ ID NO:77, SEQ ID NO:78, SEQ ID NO:79, SEQ ID NO:80, SEQ ID NO:81, SEQ ID NO:82, SEQ ID NO:83, SEQ ID NO:84, SEQ ID NO:85, SEQ ID NO:86, SEQ ID NO:87, SEQ ID NO:88, SEQ ID NO:89, SEQ ID NO:90, SEQ ID NO:91, SEQ ID NO:92, SEQ ID NO:93, SEQ ID NO:94, SEQ ID NO:95, SEQ ID NO:96, SEQ ID NO:97, SEQ ID NO:98, SEQ ID NO:99, SEQ ID NO:100, SEQ ID NO:101, SEQ ID NO:102, SEQ ID NO:103, SEQ ID NO:104, SEQ ID NO:105, SEQ ID NO:106, SEQ ID NO:107, SEQ ID NO:108, SEQ ID NO:109, SEQ ID NO:110, SEQ ID NO:111, SEQ ID NO:112, SEQ ID NO:113, SEQ ID NO:114, SEQ ID NO:115, SEQ ID NO:116, SEQ ID NO:117, SEQ ID NO:118, SEQ ID NO:119, SEQ ID NO:120, SEQ ID NO:121, SEQ ID NO:122, SEQ ID NO:123, SEQ ID NO:124, SEQ ID NO:125, SEQ ID NO:126, SEQ ID NO:127, SEQ ID NO:128, SEQ ID NO:129, SEQ ID NO:130, SEQ ID NO:131, SEQ ID NO:132, SEQ ID NO:133, SEQ ID NO:134, SEQ ID NO:135, SEQ ID NO:136, SEQ ID NO:137, SEQ ID NO:138, SEQ ID NO:139, SEQ ID NO:140, SEQ ID NO:141, SEQ ID NO:142, SEQ ID NO:143, SEQ ID NO:144, SEQ ID NO:145, SEQ ID NO:146, SEQ ID NO:147, SEQ ID NO:148, SEQ ID NO:149, SEQ ID NO:150, SEQ ID NO:151, SEQ ID NO:152, SEQ ID NO:153, SEQ ID NO:154, SEQ ID NO:155, SEQ ID NO:156, SEQ ID NO:157, SEQ ID NO:158, SEQ ID NO:159, SEQ ID NO:160, SEQ ID NO:161, SEQ ID NO:162, SEQ ID NO:163 SEQ ID NO:164, SEQ ID NO:165, SEQ ID NO:166, SEQ ID NO:167, SEQ ID NO:168, SEQ ID NO:169, SEQ ID NO:170, SEQ ID NO:171, SEQ ID NO:172, SEQ ID NO:173, SEQ ID NO:174, SEQ ID NO:175, SEQ ID NO:176, SEQ ID NO:177, SEQ ID NO:178, SEQ ID NO:179, SEQ ID NO:180, SEQ ID NO:181, SEQ ID NO:182, SEQ ID NO:183, SEQ ID NO:184, SEQ ID NO:185, SEQ ID NO:186, SEQ ID NO:187, SEQ ID NO:188, SEQ ID NO:189, SEQ ID NO:190, SEQ ID NO:191, SEQ ID NO:192, SEQ ID NO:193, SEQ ID NO:194, SEQ ID NO:195, SEQ ID NO:196, SEQ ID NO:197, SEQ ID NO:198, SEQ ID NO:199, SEQ ID NO:200, SEQ ID NO:201, SEQ ID NO:202, SEQ ID NO:203, SEQ ID NO:204, SEQ ID NO:205, SEQ ID NO:206, SEQ ID NO:207, SEQ ID NO:208, SEQ ID NO:209, SEQ ID NO:210, SEQ ID NO:211, SEQ ID NO:212, SEQ ID NO:213, SEQ ID NO:214, SEQ ID NO:215, SEQ ID NO:216, SEQ ID NO:217, SEQ ID NO:218, SEQ ID NO:219, SEQ ID NO:220, SEQ ID NO:221, SEQ ID NO:222, SEQ ID NO:223, SEQ ID NO:224, SEQ ID NO:225, SEQ ID NO:226, SEQ ID NO:227, SEQ ID NO:228, SEQ ID NO:229, SEQ ID NO:230, SEQ ID NO:231, SEQ ID NO:232, SEQ ID NO:233, SEQ ID NO:234, SEQ ID NO:235, SEQ ID NO:236, SEQ ID NO:237, SEQ ID NO:238, SEQ ID NO:239, SEQ ID NO:240, SEQ ID NO:241, SEQ ID NO:242, SEQ ID NO:243, SEQ ID NO:244, SEQ ID NO:245, SEQ ID NO:246, SEQ ID NO:247, SEQ ID NO:248, SEQ ID NO:249, SEQ ID NO:250, SEQ ID NO:251, SEQ ID NO:252, SEQ ID NO:253, SEQ ID NO:254, SEQ ID NO:255, SEQ ID NO:256, SEQ ID NO:257, SEQ ID NO:258, SEQ ID NO:259, SEQ ID NO:260, SEQ ID NO:261, SEQ ID NO:262, SEQ ID NO:263, SEQ ID NO:264, SEQ ID NO:265, SEQ ID NO:266, SEQ ID NO:267, SEQ ID NO:268, SEQ ID NO:269, SEQ ID NO:270, SEQ ID NO:271, SEQ ID NO:272, SEQ ID NO:273, SEQ ID NO:274, SEQ ID NO:275, SEQ ID NO:276, SEQ ID NO:277, SEQ ID NO:278, SEQ ID NO:279, SEQ ID NO:280, SEQ ID NO:281, SEQ ID NO:282, SEQ ID NO:283, SEQ ID NO:284, SEQ ID NO:285, SEQ ID NO:286, SEQ ID NO:287, SEQ ID NO:288, SEQ ID NO:289, SEQ ID NO:290, SEQ ID NO:291, SEQ ID NO:292, SEQ ID NO:293, SEQ ID NO:294, SEQ ID NO:295, SEQ ID NO:296, SEQ ID NO:297, SEQ ID NO:298, SEQ ID NO:299, SEQ ID NO:300, SEQ ID NO:301, SEQ ID NO:302, SEQ ID NO:303, SEQ ID NO:304, SEQ ID NO:305, SEQ ID NO:306, SEQ ID NO:307, SEQ ID NO:308, SEQ ID NO:309, SEQ ID NO:310, SEQ ID NO:311, SEQ ID NO:312, SEQ ID NO:313, SEQ ID NO:314, SEQ ID NO:315, SEQ ID NO:316, SEQ ID NO:317, SEQ ID NO:318, SEQ ID NO:319, SEQ ID NO:320, SEQ ID NO:321, SEQ ID NO:322, SEQ ID NO:323, SEQ ID NO:324, SEQ ID NO:325, SEQ ID NO:326, SEQ ID NO:327, SEQ ID NO:328, SEQ ID NO:329, SEQ ID NO:330, SEQ ID NO:331, SEQ ID NO:332, SEQ ID NO:333, SEQ ID NO:334, SEQ ID NO:335, SEQ ID NO:336, SEQ ID NO:337, SEQ ID NO:338, SEQ ID NO:339, SEQ ID NO:340, SEQ ID NO:341, SEQ ID NO:342, SEQ ID NO:343, SEQ ID NO:344, SEQ ID NO:345, SEQ ID NO:346, SEQ ID NO:347, SEQ ID NO:348, SEQ ID NO:349, SEQ ID NO:350, SEQ ID NO:351, SEQ ID NO:352, SEQ ID NO:353, SEQ ID NO:354, SEQ ID NO:355, SEQ ID NO:356, SEQ ID NO:357, SEQ ID NO:358, SEQ ID NO:359, SEQ ID NO:360, SEQ ID NO:361, SEQ ID NO:362, SEQ ID NO:363, SEQ ID NO:364, SEQ ID NO:365, SEQ ID NO:366, SEQ ID NO:367, SEQ ID NO:368, SEQ ID NO:369, SEQ ID NO:370, SEQ ID NO:371, SEQ ID NO:372, SEQ ID NO:373, SEQ ID NO:374, SEQ ID NO:375, SEQ ID NO:376, SEQ ID NO:377, SEQ ID NO:378, SEQ ID NO:379, SEQ ID NO:380, SEQ ID NO:381, SEQ ID NO:382, SEQ ID NO:383, SEQ ID NO:384, SEQ ID NO:385, SEQ ID NO:386, SEQ ID NO:387, SEQ ID NO:388, SEQ ID NO:389, SEQ ID NO:390, SEQ ID NO:391, SEQ ID NO:392, SEQ ID NO:393, SEQ ID NO:394, SEQ ID NO:395, SEQ ID NO:396, SEQ ID NO:397, SEQ ID NO:398, SEQ ID NO:399, SEQ ID NO:400, SEQ ID NO:401, SEQ ID NO:402, SEQ ID NO:403, SEQ ID NO:404, SEQ ID NO:405, SEQ ID NO:406, SEQ ID NO:407, SEQ ID NO:408, SEQ ID NO:409, SEQ ID NO:410, SEQ ID NO:411, SEQ ID NO:412, SEQ ID NO:413, SEQ ID NO:414, SEQ ID NO:415, SEQ ID NO:416, SEQ ID NO:417, SEQ ID NO:413, SEQ ID NO:419, SEQ ID NO:420, SEQ ID NO:421, SEQ ID NO:422, SEQ ID NO:423, SEQ ID NO:424, SEQ ID NO:425, SEQ ID NO:426, SEQ ID NO:427, SEQ ID NO:428, SEQ ID NO:429, SEQ ID NO:430, SEQ ID NO:431, SEQ ID NO:432, SEQ ID NO:433, SEQ ID NO:434, SEQ ID NO:435, SEQ ID NO:436, SEQ ID NO:437, SEQ ID NO:438, SEQ ID NO:439, SEQ ID NO:440, SEQ ID NO:441, SEQ ID NO:442, SEQ ID NO:443, SEQ ID NO:444, SEQ ID NO:445, SEQ ID NO:446, SEQ ID NO:447, SEQ ID NO:448, SEQ ID NO:449, SEQ ID NO:450, SEQ ID NO:451, SEQ ID NO:452, SEQ ID NO:453, SEQ ID NO:454, SEQ ID NO:455, SEQ ID NO:456, SEQ ID NO:457, SEQ ID NO:458, SEQ ID NO:459, SEQ ID NO:460, SEQ ID NO:461, SEQ ID NO:462, SEQ ID NO:463, SEQ ID NO:464, SEQ ID NO:465, SEQ ID NO:466, SEQ ID NO:467, SEQ ID NO:468, SEQ ID NO:469, SEQ ID NO:470, SEQ ID NO:471, SEQ ID NO:472, SEQ ID NO:473, SEQ ID NO:474, SEQ ID NO:475, SEQ ID NO:476, SEQ ID NO:477, SEQ ID NO:478, SEQ ID NO:479, SEQ ID NO:480, SEQ ID NO:481, SEQ ID NO:482, SEQ ID NO:483, SEQ ID NO:484, SEQ ID NO:485, SEQ ID NO:486, SEQ ID NO:487, SEQ ID NO:488, SEQ ID NO:489, SEQ ID NO:490, SEQ ID NO:491, SEQ ID NO:492, SEQ ID NO:493, SEQ ID NO:494, SEQ ID NO:495, SEQ ID NO:496, SEQ ID NO:497, SEQ ID NO:498, SEQ ID NO:499, SEQ ID NO:500, SEQ ID NO:501, SEQ ID NO:502, SEQ ID NO:503, SEQ ID NO:504, SEQ ID NO:505, SEQ ID NO:506, SEQ ID NO:507, SEQ ID NO:508, SEQ ID NO:509, SEQ ID NO:510, SEQ ID NO:511, SEQ ID NO:512, SEQ ID NO:513, SEQ ID NO:514, SEQ ID NO:515, SEQ ID NO:516, SEQ ID NO:517, SEQ ID NO:518, SEQ ID NO:519, SEQ ID NO:520, SEQ ID NO:521, SEQ ID NO:522, SEQ ID NO:523, SEQ ID NO:524, SEQ ID NO:525, SEQ ID NO:526, SEQ ID NO:527, SEQ ID NO:528, SEQ ID NO:529, SEQ ID NO:530, SEQ ID NO:531, SEQ ID NO:532, SEQ ID NO:533, SEQ ID NO:534, SEQ ID NO:535, SEQ ID NO:536, SEQ ID NO:537, SEQ ID NO:538, SEQ ID NO:539, SEQ ID NO:540, SEQ ID NO:541, SEQ ID NO:542, SEQ ID NO:543, SEQ ID NO:544, SEQ ID NO:545, SEQ ID NO:546, SEQ ID NO:547, SEQ ID NO:548, SEQ ID NO:549, SEQ ID NO:550, SEQ ID NO:551, SEQ ID NO:552, SEQ ID NO:553, SEQ ID NO:554, SEQ ID NO:555, SEQ ID NO:556, SEQ ID NO:557, SEQ ID NO:558, SEQ ID NO:559, SEQ ID NO:560, SEQ ID NO:561, SEQ ID NO:562, SEQ ID NO:563, SEQ ID NO:564, SEQ ID NO:565, SEQ ID NO:566, SEQ ID NO:567, SEQ ID NO:568, SEQ ID NO:569, SEQ ID NO:570, SEQ ID NO:571, SEQ ID NO:572, SEQ ID NO:573, SEQ ID NO:574, SEQ ID NO:575, SEQ ID NO:576, SEQ ID NO:577, SEQ ID NO:578, SEQ ID NO:579, SEQ ID NO:580, SEQ ID NO:581, SEQ ID NO:582, SEQ ID NO:583, SEQ ID NO:584, SEQ ID NO:585, SEQ ID NO:586, SEQ ID NO:587, SEQ ID NO:588, SEQ ID NO:589, SEQ ID NO:590, SEQ ID NO:591, SEQ ID NO:592, SEQ ID NO:593, SEQ ID NO:594, SEQ ID NO:595, SEQ ID NO:596, SEQ ID NO:597, SEQ ID NO:598, SEQ ID NO:599, SEQ ID NO:600, SEQ ID NO:601, SEQ ID NO:602, SEQ ID NO:603, SEQ ID NO:604, SEQ ID NO:605, SEQ ID NO:606, SEQ ID NO:607, SEQ ID NO:608, SEQ ID NO:609, SEQ ID NO:610, SEQ ID NO:611, SEQ ID NO:612, SEQ ID NO:613, SEQ ID NO:614, SEQ ID NO:615, SEQ ID NO:616, SEQ ID NO:617, SEQ ID NO:618, SEQ ID NO:619, SEQ ID NO:620, SEQ ID NO:621, SEQ ID NO:622, SEQ ID NO:623, SEQ ID NO:624, SEQ ID NO:625;

[0020] or to a complement of said sequence.

[0021] The invention also provides for proteins encoded by the above-described polynucleotides. In certain preferred embodiments, the polynucleotide is operably linked to an expression control sequence. The invention also provides a host cell, including bacterial, yeast, insect and mammalian cells, transformed with such polynucleotide compositions. Also provided by the present invention are organisms that have enhanced, reduced, or modified expression of the gene(s) corresponding to the polynucleotide sequences disclosed herein.

[0022] Processes are also provided for producing a protein, which comprise:

[0023] (a) growing a culture of the host cell transformed with such polynucleotide compositions in a suitable culture medium; and

[0024] (b) purifying the protein from the culture.

[0025] The protein produced according to such methods is also provided by the present invention.

[0026] Protein compositions of the present invention may further comprise a pharmaceutically acceptable carrier. Compositions comprising an antibody which specifically reacts with such protein are also provided by the present invention.

[0027] Methods are also provided for preventing, treating or ameliorating a medical condition which comprises administering to a mammalian subject a therapeutically effective amount of a composition comprising a protein of the present invention, and/or a polynucleotide of the present invention, and a pharmaceutically acceptable carrier.

### DETAILED DESCRIPTION

[0028] The nucleotide sequences of the isolated cDNAs of the present invention are reported in the Sequence Listing below. Table 2 lists the “Clone ID Nos.” assigned by applicants to each SEQ ID NO: in the Sequence Listing.

TABLE 2
Each pair of entries in this table consists of the
SEQ ID NO (e.g., 1, 2, etc.) followed by the Clone ID No.
for such sequence (e.g., YI116_1, YI117_1, etc.).

| | |
|---|---|
| 1 | YI116_1 |
| 2 | YI117_1 |
| 3 | YI118_1 |
| 4 | YI119_1 |
| 5 | YI120_1 |
| 6 | YI122_1 |
| 7 | YI123_1 |
| 8 | YI124_1 |
| 9 | YI125_1 |
| 10 | YI126_1 |
| 11 | YI127_1 |
| 12 | YI128_1 |
| 13 | YI129_1 |
| 14 | YI130_1 |
| 15 | YI131_1 |
| 16 | YI132_1 |
| 17 | YI133_1 |
| 18 | YI135_1 |
| 19 | YI136_1 |
| 20 | YI137_1 |
| 21 | YI138_1 |
| 22 | YI139_1 |
| 23 | YI13_1 |
| 24 | YI140_1 |
| 25 | YI141_1 |
| 26 | YI142_1 |
| 27 | YI143_1 |
| 28 | YI144_1 |
| 29 | YI145_1 |
| 30 | YI146_1 |
| 31 | YI147_1 |
| 32 | YI148_1 |
| 33 | YI149_1 |
| 34 | YI14_1 |
| 35 | YI150_1 |
| 36 | YI151_1 |
| 37 | YI152_1 |
| 38 | YI153_1 |
| 39 | YI154_1 |
| 40 | YI155_1 |
| 41 | YI156_1 |
| 42 | YI157_1 |
| 43 | YI158_1 |
| 44 | YI159_1 |
| 45 | YI160_1 |
| 46 | YI161_1 |
| 47 | YI162_1 |
| 48 | YI163_1 |
| 49 | YI164_1 |
| 50 | YI165_1 |
| 51 | YI166_1 |
| 52 | YI167_1 |
| 53 | YI168_1 |
| 54 | YI169_1 |
| 55 | YI170_1 |
| 56 | YI171_1 |
| 57 | YI172_1 |
| 58 | YI173_1 |
| 59 | YI174_1 |
| 60 | YI175_1 |
| 61 | YI176_1 |
| 62 | YI177_1 |
| 63 | YI179_1 |
| 64 | YI180_1 |
| 65 | YI181_1 |
| 66 | YI182_1 |
| 67 | YI183_1 |
| 68 | YI185_1 |
| 69 | YI186_1 |
| 70 | YI188_1 |
| 71 | YI189_1 |
| 72 | YI19_1 |
| 73 | YI20_1 |
| 74 | YI21_1 |
| 75 | YI22_1 |
| 76 | YI23_1 |
| 77 | YI24_1 |
| 78 | YI25_1 |
| 79 | YI26_1 |
| 80 | YI27_1 |
| 81 | YI28_1 |
| 82 | YI29_1 |
| 83 | YI2_1 |
| 84 | YI30_1 |
| 85 | YI33_1 |
| 86 | YI34_1 |
| 87 | YI36_1 |
| 88 | YI37_1 |
| 89 | YI38_1 |
| 90 | YI39_1 |
| 91 | YI40_1 |
| 92 | YI41_1 |
| 93 | YI42_1 |
| 94 | YI43_1 |
| 95 | YI46_1 |
| 96 | YI47_1 |
| 97 | YI48_1 |
| 98 | YI49_1 |
| 99 | YI50_1 |
| 100 | YI51_1 |
| 101 | YI53_1 |
| 102 | YI54_1 |
| 103 | YI55_1 |
| 104 | YI56_1 |
| 105 | YI57_1 |
| 106 | YI58_1 |
| 107 | YI59_1 |
| 108 | YI5_1 |
| 109 | YI60_1 |
| 110 | YI61_1 |
| 111 | YI63_1 |
| 112 | YI64_1 |
| 113 | YI65_1 |
| 114 | YI66_1 |
| 115 | YI67_1 |
| 116 | YI69_1 |
| 117 | YI70_1 |
| 118 | YI71_1 |
| 119 | YI72_1 |
| 120 | YI73_1 |
| 121 | YI74_1 |
| 122 | YI76_1 |
| 123 | YI77_1 |
| 124 | YI79_1 |
| 125 | YI80_1 |
| 126 | YI81_1 |
| 127 | YI82_1 |
| 128 | YI84_1 |
| 129 | YI85_1 |
| 130 | YI86_1 |
| 131 | YI87_1 |
| 132 | YI88_1 |
| 133 | YI89_1 |
| 134 | YI90_1 |
| 135 | YI91_1 |
| 136 | YI92_1 |
| 137 | YI93_1 |
| 138 | YI94_1 |
| 139 | YI95_1 |
| 140 | YI96_1 |
| 141 | YI97_1 |
| 142 | YI98_1 |
| 143 | YI99_1 |
| 144 | YIA17_1 |
| 145 | YIA18_1 |
| 146 | YIA19_1 |
| 147 | YIA1_1 |
| 148 | YIA20_1 |
| 149 | YIA21_1 |
| 150 | YJ11_1 |
| 151 | YJ12_1 |
| 152 | YJ13_1 |
| 153 | YJ14_1 |
| 154 | YJ15_1 |
| 155 | YJ16_1 |
| 156 | YJ17_1 |
| 157 | YJ18_1 |
| 158 | YJ19_1 |
| 159 | YJ1_1 |
| 160 | YJ20_1 |
| 161 | YJ21_1 |
| 162 | YJ22_1 |
| 163 | YJ24_1 |
| 164 | YJ25_1 |
| 165 | YJ26_1 |
| 166 | YJ27_1 |
| 167 | YJ2_1 |
| 168 | YJ30_1 |
| 169 | YJ31_1 |
| 170 | YJ34_1 |
| 171 | YJ35_1 |
| 172 | YJ36_1 |
| 173 | YJ37_1 |
| 174 | YJ38_1 |
| 175 | YJ4_1 |
| 176 | YJ8_1 |
| 177 | YJ9_1 |
| 178 | YJA1_1 |
| 179 | YJA23_1 |
| 180 | YJA25_1 |
| 181 | YJA26_1 |
| 182 | YJA28_1 |
| 183 | YJA29_1 |
| 184 | YJA30_1 |
| 185 | YJA31_1 |
| 186 | YJA32_1 |
| 187 | YJA33_1 |
| 188 | YJA34_1 |
| 189 | YJA35_1 |
| 190 | YJA36_1 |
| 191 | YJA37_1 |
| 192 | YJA38_1 |
| 193 | YJA39_1 |
| 194 | YJA40_1 |
| 195 | YJA41_1 |
| 196 | YJA42_1 |
| 197 | YJA43_1 |
| 198 | YJA44_1 |
| 199 | YJA45_1 |
| 200 | YJA46_1 |
| 201 | YJA47_1 |
| 202 | YK102_1 |
| 203 | YK103_1 |
| 204 | YK104_1 |
| 205 | YK105_1 |
| 206 | YK106_1 |
| 207 | YK107_1 |
| 208 | YK108_1 |
| 209 | YK109_1 |
| 210 | YK10_1 |
| 211 | YK110_1 |
| 212 | YK111_1 |
| 213 | YK112_1 |
| 214 | YK113_1 |
| 215 | YK114_1 |
| 216 | YK115_1 |
| 217 | YK116_1 |
| 218 | YK117_1 |
| 219 | YK118_1 |
| 220 | YK119_1 |
| 221 | YK11_1 |
| 222 | YK120_1 |
| 223 | YK121_1 |
| 224 | YK122_1 |
| 225 | YK123_1 |
| 226 | YK124_1 |
| 227 | YK126_1 |
| 228 | YK127_1 |
| 229 | YK128_1 |
| 230 | YK129_1 |
| 231 | YK12_1 |
| 232 | YK130_1 |
| 233 | YK131_1 |
| 234 | YK132_1 |
| 235 | YK133_1 |
| 236 | YK134_1 |
| 237 | YK135_1 |
| 238 | YK136_1 |
| 239 | YK137_1 |
| 240 | YK138_1 |
| 241 | YK139_1 |
| 242 | YK13_1 |
| 243 | YK140_1 |
| 244 | YK141_1 |
| 245 | YK142_1 |
| 246 | YK144_1 |
| 247 | YK145_1 |
| 248 | YK146_1 |
| 249 | YK147_1 |
| 250 | YK148_1 |
| 251 | YK149_1 |
| 252 | YK150_1 |
| 253 | YK151_1 |
| 254 | YK152_1 |
| 255 | YK153_1 |
| 256 | YK154_1 |
| 257 | YK155_1 |
| 258 | YK157_1 |
| 259 | YK158_1 |
| 260 | YK159_1 |
| 261 | YK15_1 |
| 262 | YK160_1 |
| 263 | YK161_1 |
| 264 | YK162_1 |
| 265 | YK163_1 |
| 266 | YK164_1 |
| 267 | YK165_1 |
| 268 | YK166_1 |
| 269 | YK167_1 |
| 270 | YK168_1 |
| 271 | YK169_1 |
| 272 | YK16_1 |
| 273 | YK170_1 |
| 274 | YK171_1 |
| 275 | YK172_1 |
| 276 | YK175_1 |
| 277 | YK176_1 |
| 278 | YK177_1 |
| 279 | YK178_1 |
| 280 | YK179_1 |
| 281 | YK17_1 |
| 282 | YK180_1 |
| 283 | YK181_1 |
| 284 | YK182_1 |
| 285 | YK183_1 |
| 286 | YK184_1 |
| 287 | YK185_1 |
| 288 | YK186_1 |
| 289 | YK187_1 |
| 290 | YK188_1 |
| 291 | YK189_1 |
| 292 | YK18_1 |
| 293 | YK191_1 |
| 294 | YK192_1 |
| 295 | YK193_1 |
| 296 | YK194_1 |
| 297 | YK195_1 |
| 298 | YK196_1 |
| 299 | YK197_1 |
| 300 | YK198_1 |
| 301 | YK19_1 |
| 302 | YK200_1 |
| 303 | YK201_1 |
| 304 | YK202_1 |
| 305 | YK203_1 |
| 306 | YK205_1 |
| 307 | YK206_1 |
| 308 | YK207_1 |
| 309 | YK208_1 |
| 310 | YK209_1 |
| 311 | YK20_1 |
| 312 | YK210_1 |
| 313 | YK211_1 |
| 314 | YK212_1 |
| 315 | YK213_1 |
| 316 | YK214_1 |
| 317 | YK215_1 |
| 318 | YK216_1 |
| 319 | YK217_1 |
| 320 | YK218_1 |
| 321 | YK219_1 |
| 322 | YK21_1 |
| 323 | YK220_1 |
| 324 | YK221_1 |
| 325 | YK222_1 |
| 326 | YK223_1 |
| 327 | YK225_1 |
| 328 | YK226_1 |
| 329 | YK227_1 |
| 330 | YK228_1 |
| 331 | YK229_1 |
| 332 | YK22_1 |
| 333 | YK230_1 |
| 334 | YK231_1 |
| 335 | YK232_1 |
| 336 | YK233_1 |
| 337 | YK234_1 |
| 338 | YK235_1 |
| 339 | YK236_1 |
| 340 | YK237_1 |
| 341 | YK238_1 |
| 342 | YK239_1 |
| 343 | YK240_1 |
| 344 | YK241_1 |
| 345 | YK242_1 |
| 346 | YK243_1 |
| 347 | YK244_1 |
| 348 | YK245_1 |
| 349 | YK246_1 |
| 350 | YK247_1 |
| 351 | YK248_1 |
| 352 | YK249_1 |
| 353 | YK24_1 |
| 354 | YK250_1 |
| 355 | YK252_1 |
| 356 | YK253_1 |
| 357 | YK254_1 |
| 358 | YK255_1 |
| 359 | YK256_1 |
| 360 | YK257_1 |
| 361 | YK258_1 |
| 362 | YK259_1 |
| 363 | YK260_1 |
| 364 | YK262_1 |
| 365 | YK264_1 |
| 366 | YK265_1 |
| 367 | YK266_1 |
| 368 | YK267_1 |
| 369 | YK268_1 |
| 370 | YK269_1 |
| 371 | YK26_1 |
| 372 | YK270_1 |
| 373 | YK271_1 |
| 374 | YK272_1 |
| 375 | YK273_1 |
| 376 | YK274_1 |
| 377 | YK275_1 |
| 378 | YK276_1 |
| 379 | YK277_1 |
| 380 | YK278_1 |
| 381 | YK279_1 |
| 382 | YK27_1 |
| 383 | YK280_1 |
| 384 | YK281_1 |
| 385 | YK282_1 |
| 386 | YK283_1 |
| 387 | YK284_1 |
| 388 | YK285_1 |
| 389 | YK286_1 |
| 390 | YK287_1 |
| 391 | YK288_1 |
| 392 | YK289_1 |
| 393 | YK28_1 |
| 394 | YK290_1 |
| 395 | YK291_1 |
| 396 | YK292_1 |
| 397 | YK293_1 |
| 398 | YK294_1 |
| 399 | YK295_1 |
| 400 | YK296_1 |
| 401 | YK297_1 |
| 402 | YK298_1 |
| 403 | YK299_1 |
| 404 | YK29_1 |
| 405 | YK2_1 |
| 406 | YK300_1 |
| 407 | YK301_1 |
| 408 | YK302_1 |
| 409 | YK303_1 |
| 410 | YK304_1 |
| 411 | YK305_1 |
| 412 | YK306_1 |
| 413 | YK307_1 |
| 414 | YK308_1 |
| 415 | YK309_1 |
| 416 | YK30_1 |
| 417 | YK310_1 |
| 418 | YK311_1 |
| 419 | YK312_1 |
| 420 | YK313_1 |
| 421 | YK316_1 |
| 422 | YK31_1 |
| 423 | YK320_1 |
| 424 | YK326_1 |
| 425 | YK32_1 |
| 426 | YK33_1 |
| 427 | YK34_1 |
| 428 | YK35_1 |
| 429 | YK36_1 |
| 430 | YK37_1 |
| 431 | YK3_1 |
| 432 | YK40_1 |
| 433 | YK41_1 |
| 434 | YK42_1 |
| 435 | YK43_1 |
| 436 | YK44_1 |
| 437 | YK45_1 |
| 438 | YK47_1 |
| 439 | YK48_1 |
| 440 | YK49_1 |
| 441 | YK4_1 |
| 442 | YK50_1 |
| 443 | YK52_1 |
| 444 | YK53_1 |
| 445 | YK54_1 |
| 446 | YK55_1 |
| 447 | YK56_1 |
| 448 | YK57_1 |
| 449 | YK58_1 |
| 450 | YK5_1 |
| 451 | YK60_1 |
| 452 | YK63_1 |
| 453 | YK65_1 |
| 454 | YK66_1 |
| 455 | YK68_1 |
| 456 | YK69_1 |
| 457 | YK6_1 |
| 458 | YK70_1 |
| 459 | YK71_1 |
| 460 | YK72_1 |
| 461 | YK73_1 |
| 462 | YK75_1 |
| 463 | YK77_1 |
| 464 | YK79_1 |
| 465 | YK7_1 |
| 466 | YK80_1 |
| 467 | YK81_1 |
| 468 | YK83_1 |
| 469 | YK85_1 |
| 470 | YK86_1 |
| 471 | YK87_1 |
| 472 | YK88_1 |
| 473 | YK8_1 |
| 474 | YK90_1 |
| 475 | YK92_1 |
| 476 | YK93_1 |
| 477 | YK94_1 |
| 478 | YK95_1 |
| 479 | YK96_1 |
| 480 | YK97_1 |
| 481 | YK98_1 |
| 482 | YK99_1 |
| 483 | YK9_1 |
| 484 | YKA1_1 |
| 485 | YKA2_1 |
| 486 | YKA3_1 |
| 487 | YL100_1 |
| 488 | YL101_1 |
| 489 | YL102_1 |
| 490 | YL103_1 |
| 491 | YL104_1 |
| 492 | YL105_1 |
| 493 | YL106_1 |
| 494 | YL107_1 |
| 495 | YL108_1 |
| 496 | YL109_1 |
| 497 | YL10_1 |
| 498 | YL110_1 |
| 499 | YL111_1 |
| 500 | YL112_1 |
| 501 | YL113_1 |
| 502 | YL114_1 |
| 503 | YL115_1 |
| 504 | YL116_1 |
| 505 | YL117_1 |
| 506 | YL118_1 |
| 507 | YL119_1 |
| 508 | YL11_1 |
| 509 | YL120_1 |
| 510 | YL121_1 |
| 511 | YL122_1 |
| 512 | YL123_1 |
| 513 | YL124_1 |
| 514 | YL125_1 |
| 515 | YL126_1 |
| 516 | YL127_1 |
| 517 | YL128_1 |
| 518 | YL129_1 |
| 519 | YL12_1 |
| 520 | YL130_1 |
| 521 | YL131_1 |
| 522 | YL132_1 |
| 523 | YL133_1 |
| 524 | YL134_1 |
| 525 | YL135_1 |
| 526 | YL136_1 |
| 527 | YL137_1 |
| 528 | YL138_1 |
| 529 | YL139_1 |
| 530 | YL13_1 |
| 531 | YL140_1 |
| 532 | YL141_1 |
| 533 | YL142_1 |
| 534 | YL143_1 |
| 535 | YL144_1 |
| 536 | YL145_1 |
| 537 | YL146_1 |
| 538 | YL147_1 |
| 539 | YL148_1 |
| 540 | YL149_1 |
| 541 | YL150_1 |
| 542 | YL151_1 |
| 543 | YL152_1 |
| 544 | YL153_1 |
| 545 | YL154_1 |
| 546 | YL155_1 |
| 547 | YL156_1 |
| 548 | YL157_1 |
| 549 | YL158_1 |
| 550 | YL15_1 |
| 551 | YL160_1 |
| 552 | YL161_1 |
| 553 | YL163_1 |
| 554 | YL164_1 |
| 555 | YL165_1 |
| 556 | YL166_1 |
| 557 | YL167_1 |
| 558 | YL168_1 |
| 559 | YL169_1 |
| 560 | YL16_1 |
| 561 | YL170_1 |
| 562 | YL171_1 |
| 563 | YL172_1 |
| 564 | YL173_1 |
| 565 | YL174_1 |
| 566 | YL175_1 |
| 567 | YL176_1 |
| 568 | YL177_1 |
| 569 | YL178_1 |
| 570 | YL17_1 |
| 571 | YL180_1 |
| 572 | YL181_1 |
| 573 | YL182_1 |
| 574 | YL184_1 |
| 575 | YL186_1 |
| 576 | YL187_1 |
| 577 | YL188_1 |
| 578 | YL189_1 |
| 579 | YL190_1 |
| 580 | YL191_1 |
| 581 | YL192_1 |
| 582 | YL193_1 |
| 583 | YL195_1 |
| 584 | YL196_1 |
| 585 | YL197_1 |
| 586 | YL198_1 |
| 587 | YL199_1 |
| 588 | YL19_1 |
| 589 | YL1_1 |
| 590 | YL200_1 |
| 591 | YL201_1 |
| 592 | YL202_1 |
| 593 | YL203_1 |
| 594 | YL204_1 |
| 595 | YL205_1 |
| 596 | YL206_1 |
| 597 | YL207_1 |
| 598 | YL208_1 |
| 599 | YL209_1 |
| 600 | YL20_1 |
| 601 | YL210_1 |
| 602 | YL211_1 |
| 603 | YL212_1 |
| 604 | YL213_1 |
| 605 | YL214_1 |
| 606 | YL215_1 |
| 607 | YL216_1 |
| 608 | YL217_1 |
| 609 | YL218_1 |
| 610 | YL219_1 |
| 611 | YL21_1 |
| 612 | YL220_1 |
| 613 | YL221_1 |
| 614 | YL222_1 |
| 615 | YL223_1 |
| 616 | YL224_1 |
| 617 | YL225_1 |
| 618 | YL226_1 |
| 619 | YL227_1 |
| 620 | YL228_1 |
| 621 | YL229_1 |
| 622 | YL22_1 |
| 623 | YL230_1 |
| 624 | YL231_1 |
| 625 | YL232_1 |

[0029] The “Clone ID No.” for a particular clone consists of one or two letters followed by a number. The letters designate the tissue source from which the cDNA for that clone was isolated, and these sources are listed in Table 3 below.

TABLE 3

| Sel. | Species | Stage | Tissue | Cell Type | Treatment |
|---|---|---|---|---|---|
| YI | Human | Adult | Brain | N/A | None |
| YIA | Human | Adult | Thymus | N/A | None |
| YJ | Human | Adult | Kidney | 293 embryonal car- | None |
| | | | | cinoma line | |
| YJA | Human | Adult | Retina | WERI-Rb1 retino- | None |
| | | | | blastoma line | |
| YK | Human | Adult | Thymus | N/A | None |
| YKA | Human | Adult | Fibrosarcoma | Epithelial HT-1080 | None |
| | | | | line | |
| YL | Human | Adult | Spleen | N/A | None |

[0030] Thus, the tissue source for a particular cDNA sequence can be identified in Table 3 by the one and two letter designations used in the relevant “Clone ID No.” in Table 2. For example, a cDNA clone designated as “YI116_{—}1” would have been isolated a human adult brain library (i.e., selection “YI”) as indicated in Table 3.

[0031] As used herein, “polynucleotide” includes single- and double-stranded RNAs, DNAs and RNA:DNA hybrids.

[0032] As used herein a “secreted” protein is one which, when expressed in a suitable host cell, is transported across or through a membrane, including transport as a result of signal sequences in its amino acid sequence. “Secreted” proteins include without limitation proteins secreted wholly (e.g., soluble proteins) or partially (e.g., receptors) from the cell in which they are expressed. “Secreted” proteins also include without limitation proteins which are transported across the membrane of the endoplasmic reticulum.

[0033] Fragments of the proteins of the present invention which are capable of exhibiting biological activity are also encompassed by the present invention. Fragments of the protein may be in linear form or they may be cyclized using known methods, for example, as described in H. U. Saragovi, et al., Bio/Technology 10, 773-778 (1992) and in R. S. McDowell, et al., J. Amer. Chem. Soc. 114, 9245-9253 (1992), both of which are incorporated herein by reference. Such fragments may be fused to carrier molecules such as immunoglobulins for many purposes, including increasing the valency of protein binding sites. For example, fragments of the protein may be fused through “linker” sequences to the Fc portion of an immunoglobulin. For a bivalent form of the protein, such a fusion could be to the Fc portion of an IgG molecule. Other immunoglobulin isotypes may also be used to generate such fusions. For example, a protein-IgM fusion would generate a decavalent form of the protein of the invention.

[0034] The present invention also provides both full-length and mature forms of the disclosed proteins. The full-length form of the such proteins is identified in the sequence listing by translation of the nucleotide sequence of each disclosed clone. The mature form(s) of such protein may be obtained by expression of the disclosed full-length polynucleotide (preferably those deposited with ATCC) in a suitable mammalian cell or other host cell. The sequence(s) of the mature form(s) of the protein may also be determinable from the amino acid sequence of the full-length form.

[0035] The present invention also provides genes corresponding to the polynucleotide sequences disclosed herein. “Corresponding genes” are the regions of the genome that are transcribed to produce the mRNAs from which cDNA polynucleotide sequences are derived and may include contiguous regions of the genome necessary for the regulated expression of such genes. Corresponding genes may therefore include but are not limited to coding sequences, 5′ and 3′ untranslated regions, alternatively spliced exons, introns, promoters, enhancers, and silencer or suppressor elements. The corresponding genes can be isolated in accordance with known methods using the sequence information disclosed herein. Such methods include the preparation of probes or primers from the disclosed sequence information for identification and/or amplification of genes in appropriate genomic libraries or other sources of genomic materials. An “isolated gene” is a gene that has been separated from the adjacent coding sequences, if any, present in the genome of the organism from which the gene was isolated.

[0036] The chromosomal location corresponding to the polynucleotide sequences disclosed herein may also be determined, for example by hybridizing appropriately labeled polynucleotides of the present invention to chromosomes in situ. It may also be possible to determine the corresponding chromosomal location for a disclosed polynucleotide by identifying significantly similar nucleotide sequences in public databases, such as expressed sequence tags (ESTs), that have already been mapped to particular chromosomal locations. For at least some of the polynucleotide sequences disclosed herein, public database sequences having at least some simnilarity to the polynucleotide of the present invention have been listed by database accession number. Searches using the GenBank accession numbers of these public database sequences can then be performed at an Internet site provided by the National Center for Biotechnology Information having the address www.ncbi.nlm.nih.gov/UniGene, in order to identify “UniGene clusters” of overlapping sequences. Many of the “UniGene clusters” so identified will already have been mapped to particular chromosomal sites.

[0037] Organisms that have enhanced, reduced, or modified expression of the gene(s) corresponding to the polynucleotide sequences disclosed herein are provided. The desired change in gene expression can be achieved through the use of antisense polynucleotides or ribozymes that bind and/or cleave the mRNA transcribed from the gene (Albert and Morris, 1994, Trends Pharmacol. Sci. 15(7): 250-254; Lavarosky et al., 1997, Biochem. Mol. Med. 62(1): 11-22; and Hampel, 1998, Prog. Nucleic Acid Res. Mol. Biol. 58: 1-39; all of which are incorporated by reference herein). Transgenic animals that have multiple copies of the gene(s) corresponding to the polynucleotide sequences disclosed herein, preferably produced by transformation of cells with genetic constructs that are stably maintained within the transformed cells and their progeny, are provided. Transgenic animals that have modified genetic control regions that increase or reduce gene expression levels, or that change temporal or spatial patterns of gene expression, are also provided (see European Patent No. 0 649 464 B1, incorporated by reference herein). In addition, organisms are provided in which the gene(s) corresponding to the polynucleotide sequences disclosed herein have been partially or completely inactivated, through insertion of extraneous sequences into the corresponding gene(s) or through deletion of all or part of the corresponding gene(s). Partial or complete gene inactivation can be accomplished through insertion, preferably followed by imprecise excision, of transposable elements (Plasterk, 1992, Bioessays 14(9): 629-633; Zwaal et al., 1993, Proc. Natl. Acad. Sci. USA 90(16): 7431-7435; Clark et al., 1994, Proc. Natl. Acad. Sci. USA 91(2): 719-722; all of which are incorporated by reference herein), or through homologous recombination, preferably detected by positive/negative genetic selection strategies (Mansour et al., 1988, Nature 336: 348-352; U.S. Pat. Nos. 5,464,764; 5,487,992; 5,627,059; 5,631,153; 5,614,396; 5,616,491; and 5,679,523; all of which are incorporated by reference herein). These organisms with altered gene expression are preferably eukaryotes and more preferably are mammals. Such organisms are useful for the development of non-human models for the study of disorders involving the corresponding gene(s), and for the development of assay systems for the identification of molecules that interact with the protein product(s) of the corresponding gene(s).

[0038] Where the protein of the present invention is membrane-bound (e.g., is a receptor), the present invention also provides for soluble forms of such protein. In such forms part or all of the intracellular and transmembrane domains of the protein are deleted such that the protein is fully secreted from the cell in which it is expressed. The intracellular and transmembrane domains of proteins of the invention can be identified in accordance with known techniques for determination of such domains from sequence information.

[0039] Proteins and protein fragments of the present invention include proteins with amino acid sequence lengths that are at least 25% (more preferably at least 50%, and most preferably at least 75%) of the length of a disclosed protein and have at least 60% sequence identity (more preferably, at least 75% identity; most preferably at least 90% or 95% identity) with that disclosed protein, where sequence identity is determined by comparing the amino acid sequences of the proteins when aligned so as to maximize overlap and identity while minimizing sequence gaps. Also included in the present invention are proteins and protein fragments that contain a segment preferably comprising 8 or more (more preferably 20 or more, most preferably 30 or more) contiguous amino acids that shares at least 75% sequence identity (more preferably, at least 85% identity; most preferably at least 95% identity) with any such segment of any of the disclosed proteins.

[0040] In particular, sequence identity may be determined using WU-BLAST (Washington University BLAST) version 2.0 software, which builds upon WU-BLAST version 1.4, which in turn is based on the public domain NCBI-BLAST version 1.4 (Altschul and Gish, 1996, Local alignment statistics, Doolittle ed., Methods in Enzymology 266: 460-480; Altschul et al., 1990, Basic local alignment search tool, Journal of Molecular Biology 215: 403-410; Gish and States, 1993, Identification of protein coding regions by database similarity search, Nature Genetics 3: 266-272; Karlin and Altschul, 1993, Applications and statistics for multiple high-scoring segments in molecular sequences, Proc. Natl. Acad. Sci. USA 90: 5873-5877; all of which are incorporated by reference herein). WU-BLAST version 2.0 executable programs for several UNIX platforms can be downloaded from the Internet file-transfer protocol (FTP) site ftp://blast.wustl.edu/blast/executables. The complete suite of search programs (BLASTP, BLASTN, BLASTX, TBLASTN, and TBLASTX) is provided at that site, in addition to several support programs. WU-BLAST 2.0 is copyrighted and may not be sold or redistributed in any form or manner without the express written consent of the author; but the posted executables may otherwise be freely used for commercial, nonprofit, or academic purposes. In all search programs in the suite—BLASTP, BLASTN, BLASTX, TBLASTN and TBLASTX—the gapped alignment routines are integral to the database search itself, and thus yield much better sensitivity and selectivity while producing the more easily interpreted output. Gapping can optionally be turned off in all of these programs, if desired. The default penalty (Q) for a gap of length one is Q=9 for proteins and BLASTP, and Q=10 for BLASTN, but may be changed to any integer value including zero, one through eight, nine, ten, eleven, twelve through twenty, twenty-one through fifty, fifty-one through one hundred, etc. The default per-residue penalty for extending a gap (R) is R=2 for proteins and BLASTP, and R=10 for BLASTN, but may be changed to any integer value including zero, one, two, three, four, five, six, seven, eight, nine, ten, eleven, twelve through twenty, twenty-one through fifty, fifty-one through one hundred, etc. Any combination of values for Q and R can be used in order to align sequences so as to maximize overlap and identity while minimizing sequence gaps. The default amino acid comparison matrix is BLOSUM62, but other amino acid comparison matrices such as PAM can be utilized.

[0041] Species homologues of the disclosed polynucleotides and proteins are also provided by the present invention. As used herein, a “species homologue” is a protein or polynucleotide with a different species of origin from that of a given protein or polynucleotide, but with significant sequence similarity to the given protein or polynucleotide. Preferably, polynucleotide species homologues have at least 60% sequence identity (more preferably, at least 75% identity; most preferably at least 90% identity) with the given polynucleotide, and protein species homologues have at least 30% sequence identity (more preferably, at least 45% identity; most preferably at least 60% identity) with the given protein, where sequence identity is determined by comparing the nucleotide sequences of the polynucleotides or the amino acid sequences of the proteins when aligned so as to maximize overlap and identity while minimizing sequence gaps. Species homologues may be isolated and identified by making suitable probes or primers from the sequences provided herein and screening a suitable nucleic acid source from the desired species. Preferably, species homologues are those isolated from mammalian species. Most preferably, species homologues are those isolated from certain mammalian species such as, for example, Pan troglodytes, Gorilla gorilla, Pongo pygmaeus, Hylobates concolor, Macaca mulatta, Papio papio, Papio hamadryas, Cercopithecus aethiops, Cebus capucinus, Aotus trivirgatus, Sanguinus oedipus, Microcebus murinus, Mus musculus, Rattus norvegicus, Cricetulus griseus, Felis catus, Mustela vison, Canis familiaris, Oryctolagus cuniculus, Bos taurus, Ovis aries, Sus scrofa, and Equus caballus, for which genetic maps have been created allowing the identification of syntenic relationships between the genomic organization of genes in one species and the genomic organization of the related genes in another species (O'Brien and Seuánez, 1988, Ann. Rev. Genet. 22: 323-351; O'Brien et al., 1993, Nature Genetics 3:103-112; Johansson et al., 1995, Genomics 25: 682-690; Lyons et al., 1997, Nature Genetics 15: 47-56; O'Brien et al., 1997, Trends in Genetics 13(10): 393-399; Carver and Stubbs, 1997, Genome Research 7:1123-1137; all of which are incorporated by reference herein).

[0042] The invention also encompasses allelic variants of the disclosed polynucleotides or proteins; that is, naturally-occurring alternative forms of the isolated polynucleotides which also encode proteins which are identical or have significantly similar sequences to those encoded by the disclosed polynucleotides. Preferably, allelic variants have at least 60% sequence identity (more preferably, at least 75% identity; most preferably at least 90% identity) with the given polynucleotide, where sequence identity is determined by comparing the nucleotide sequences of the polynucleotides when aligned so as to maximize overlap and identity while minimizing sequence gaps. Allelic variants may be isolated and identified by making suitable probes or primers from the sequences provided herein and screening a suitable nucleic acid source from individuals of the appropriate species.

[0043] The invention also includes polynucleotides with sequences complementary to those of the polynucleotides disclosed herein.

[0044] The present invention also includes polynucleotides that hybridize under reduced stringency conditions, more preferably stringent conditions, and most preferably highly stringent conditions, to polynucleotides described herein. Examples of stringency conditions are shown in the table below: highly stringent conditions are those that are at least as stringent as, for example, conditions A-F; stringent conditions are at least as stringent as, for example, conditions G-L; and reduced stringency conditions are at least as stringent as, for example, conditions M-R.

| | | Hybrid | | Wash |
|---|---|---|---|---|
| Stringency | Polynucleotide | Length | Hybridization Temperature and | Temperature |
| Condition | Hybrid | (bp)‡ | Buffer\ | and Buffer† |
| A | DNA:DNA | ≧ 50 | 65° C.; 1 × SSC -or- | 65° C.; 0.3 × SSC |
| | | | 42° C.; 1 × SSC, 50% formamide | |
| B | DNA:DNA | <50 | T_{B}*; 1 × SSC | T_{B}*; 1 × SSC |
| C | DNA:RNA | ≧50 | 67° C.; 1 × SSC -or- | 67° C.; 0.3 × SSC |
| | | | 45° C.; 1 × SSC, 50% formamide | |
| D | DNA:RNA | <50 | T_{D}*; 1 × SSC | T_{D}*; 1 × SSC |
| E | RNA:RNA | ≧50 | 70° C.; 1 × SSC -or- | 70° C.; 0.3 × SSC |
| | | | 50° C.; 1 × SSC, 50% formamide | |
| F | RNA:RNA | <50 | T_{F}*; 1 × SSC | T_{F}*; 1 × SSC |
| G | DNA:DNA | ≧50 | 65° C.; 4 × SSC -or- | 65° C.; 1 × SSC |
| | | | 42° C.; 4 × SSC, 50% formamide | |
| H | DNA:DNA | <50 | T_{H}*; 4 × SSC | T_{H}*; 4 × SSC |
| I | DNA:RNA | ≧50 | 67° C.; 4 × SSC -or- | 67° C.; 1 × SSC |
| | | | 45° C.; 4 × SSC, 50% formamide | |
| J | DNA:RNA | <50 | T_{J}*; 4 × SSC | T_{J}*; 4 × SSC |
| K | RNA:RNA | ≧50 | 70° C.; 4 × SSC -or- | 67° C.; 1 × SSC |
| | | | 50° C.; 4 × SSC, 50% formamide | |
| L | RNA:RNA | <50 | T_{L}*; 2 × SSC | T_{L}*; 2 × SSC |
| M | DNA:DNA | ≧50 | 50° C.; 4 × SSC -or- | 50° C.; 2 × SSC |
| | | | 40° C.; 6 × SSC, 50% formamide | |
| N | DNA:DNA | <50 | T_{N}*; 6 × SSC | T_{N}*; 6 × SSC |
| O | DNA:RNA | ≧50 | 55° C.; 4 × SSC -or- | 55° C.; 2 × SSC |
| | | | 42° C.; 6 × SSC, 50% formamide | |
| P | DNA:RNA | <50 | T_{P}*; 6 × SSC | T_{P}*; 6 × SSC |
| Q | RNA:RNA | ≧50 | 60° C.; 4 × SSC -or- | 60° C.; 2 × SSC |
| | | | 45° C.; 6 × SSC, 50% formamide | |
| R | RNA:RNA | <50 | T_{R}*; 4 × SSC | T_{R}*; 4 × SSC |
| ^{‡}: The hybrid length is that anticipated for the hybridized region(s) of the hybridizing polynucleotides. When hybridizing a polynucleotide to a target polynucleotide of unknown sequence, the hybrid length is assumed to be that of the hybridizing polynucleotide. When polynucleotides of known sequence are hybridized, the hybrid length can be determined by aligning the sequences of the polynucleotides and identifying the region or regions of optimal sequence complementarity. | | | | |
| ^{†}: SSPE (1 × SSPE is 0.15 M NaCl, 10 mM NaH₂PO₄, and 1.25 mM EDTA, pH 7.4) can be substituted for SSC (1 × SSC is 0.15 M NaCl and 15 mM sodium citrate) in the hybridization and wash buffers; washes are performed for 15 minutes after hybridization is complete. | | | | |
| *T_{B}-T_{R}: The hybridization temperature for hybrids anticipated to be less than 50 base pairs in length should be 5-10° C. less than the melting temperature (Tₘ) of the hybrid, where Tₘ is determined according to the following equations. For hybrids less than 18 base pairs in length Tₘ(° C.) = 2(# of A + T bases) + 4(# of G + C bases). For hybrids between 18 and 49 base pairs in length Tₘ(° C.) = 81.5 + | | | | |
| # 16.6(log[Na⁺]) + 0.41(% G + C) − (600/N), where N is the number of bases in the hybrid, and [Na⁺] is the concentration of sodium ions in the hybridazation buffer ([Na⁺] for 1 × SSC = 0.165 M). | | | | |

[0045] Additional examples of stringency conditions for polynucleotide hybridization are provided in Sambrook, J., E. F. Fritsch, and T. Maniatis, 1989, Molecular Cloning: A Laboratory Manual, Cold Spring Harbor Laboratory Press, Cold Spring Harbor, N.Y., chapters 9 and 11, and Current Protocols in Molecular Biology, 1995, F. M. Ausubel et al., eds., John Wiley & Sons, Inc., sections 2.10 and 6.3-6.4, incorporated herein by reference.

[0046] Preferably, each such hybridizing polynucleotide has a length that is at least 25%(more preferably at least 50%, and most preferably at least 75%) of the length of the polynucleotide of the present invention to which it hybridizes, and has at least 60% sequence identity (more preferably, at least 75% identity; most preferably at least 90% or 95% identity) with the polynucleotide of the present invention to which it hybridizes, where sequence identity is determined by comparing the sequences of the hybridizing polynucleotides when aligned so as to maximize overlap and identity while minimizing sequence gaps.

[0047] The isolated polynucleotide of the invention may contain sequences at its 5′ and/or 3′ end that are derived from linker, polylinker, or multiple cloning site sequences commonly found in vectors such as the pMT2 or pED expression vectors (see below). For example, sequences such as SEQ ID NO:626, SEQ ID NO:627, or SEQ ID NO:628 may be found at the 5′ end of an isolated polynucleotide of the invention, or the complement of any of these sequences may be found at its 3′ end. Similarly, sequences such as SEQ ID NO:629, SEQ ID NO:630, or SEQ ID NO:631 may be found at the 3′ end of an isolated polynucleotide of the invention, or the complement of any of these sequences may be found at its 5′ end. In addition, variants of these linker sequences may be present in isolated polynucleotides of the invention, which linker variants vary from SEQ ID NO:626 through SEQ ID NO:631 by the alteration, insertion, or deletion of one or more nucleotides. Therefore, a preferred embodiment of the invention comprises the nucleotide sequence of any of the isolated polynucleotides disclosed herein, beginning at nucleotide 25 and ending at nucleotide (N-25) of the SEQ ID NO for that polynucleotide, where N represents the total number of nucleotides in the sequence. As a specific example, a preferred embodiment of the invention comprises the nucleotide sequence of SEQ ID NO:1 from nucleotide 25 to nucleotide 1905, where the total number of nucleotides (N) in SEQ ID NO:1 is 1930, and N-25 equals 1905. More preferably, a polynucleotide of the invention comprises the nucleotide sequence of any of the isolated polynucleotides disclosed herein, beginning at nucleotide 30 and ending at nucleotide (N-30) of the SEQ ID NO for that polynucleotide. Most preferably, a polynucleotide of the invention comprises the nucleotide sequence of any of the isolated polynucleotides disclosed herein, beginning at nucleotide 35 and ending at nucleotide (N-35) of the SEQ ID NO for that polynucleotide. Similarly, additional embodiments are those nucleotide sequences that extend from nucleotide 40 to nucleotide (N-40), or from nucleotide 45 to nucleotide (N-45), or from nucleotide 50 to nucleotide (N-50), or from nucleotide 60 to nucleotide (N-60), or from nucleotide 65 to nucleotide (N-65), or from nucleotide 70 to nucleotide (N-70), or from nucleotide 75 to nucleotide (N-75), or from nucleotide 80 to nucleotide (N-80), etc., for any of the polynucleotides disclosed herein. Further preferred embodiments are those nucleotide sequences that are subsequences of the nucleotide sequences disclosed herein, beginning at any nucleotide position selected from the group consisting of nucleotide 5, nucleotide 10, nucleotide 15, nucleotide 20, nucleotide 25, nucleotide 30, nucleotide 35, nucleotide 40, nucleotide 45, nucleotide 50, nucleotide 55, nucleotide 60, nucleotide 65, nucleotide 70, nucleotide 75, or nucleotide 80, and ending at any nucleotide position selected from the group consisting of nucleotide (N-5), nucleotide (N-10), nucleotide (N-15), nucleotide (N-20), nucleotide (N-25), nucleotide (N-30), nucleotide (N-35), nucleotide (N-40), nucleotide (N-45), nucleotide (N-50), nucleotide (N-55), nucleotide (N-60), nucleotide (N-65), nucleotide (N-70), nucleotide (N-75), or nucleotide (N-80), wherein N is the total number of nucleotides disclosed for a particular SEQ ID NO.

[0048] The isolated polynucleotide of the invention may be operably linked to an expression control sequence such as the pMT2 or pED expression vectors disclosed in Kaufman et al., Nucleic Acids Res. 19, 4485-4490 (1991), in order to produce the protein recombinantly. Many suitable expression control sequences are known in the art. General methods of expressing recombinant proteins are also known and are exemplified in R. Kaufman, Methods in Enzymology 185, 537-566 (1990). As defined herein “operably linked” means that the isolated polynucleotide of the invention and an expression control sequence are situated within a vector or cell in such a way that the protein is expressed by a host cell which has been transformed (transfected) with the ligated polynucleotide/expression control sequence.

[0049] A number of types of cells may act as suitable host cells for expression of the protein. Mammalian host cells include, for example, monkey COS cells, Chinese Hamster Ovary (CHO) cells, human kidney 293 cells, human epidermal A431 cells, human Colo205 cells, 3T3 cells, CV-1 cells, other transformed primate cell lines, normal diploid cells, cell strains derived from in vitro culture of primary tissue, primary explants, HeLa cells, mouse L cells, BHK, HL-60, U937, HaK or Jurkat cells.

[0050] Alternatively, it may be possible to produce the protein in lower eukaryotes such as yeast or in prokaryotes such as bacteria. Potentially suitable yeast strains include Saccharomyces cerevisiae, Schizosaccharomyces pombe, Kluyveromyces strains, Candida, or any yeast strain capable of expressing heterologous proteins. Potentially suitable bacterial strains include Escherichia coli, Bacillus subtilis, Salmonella typhimurium, or any bacterial strain capable of expressing heterologous proteins. If the protein is made in yeast or bacteria, it may be necessary to modify the protein produced therein, for example by phosphorylation or glycosylation of the appropriate sites, in order to obtain the functional protein. Such covalent attachments may be accomplished using known chemical or enzymatic methods.

[0051] The protein may also be produced by operably linking the isolated polynucleotide of the invention to suitable control sequences in one or more insect expression vectors, and employing an insect expression system. Materials and methods for baculovirus/insect cell expression systems are commercially available in kit form from, e.g., Invitrogen, San Diego, Calif., U.S.A. (the MaxBac® kit), and such methods are well known in the art, as described in Summers and Smith, Texas Agricultural Experiment Station Bulletin No. 1555 (1987), incorporated herein by reference. As used herein, an insect cell capable of expressing a polynucleotide of the present invention is “transformed.”

[0052] The protein of the invention may be prepared by culturing transformed host cells under culture conditions suitable to express the recombinant protein. The resulting expressed protein may then be purified from such culture (i.e., from culture medium or cell extracts) using known purification processes, such as gel filtration and ion exchange chromatography. The purification of the protein may also include an affinity column containing agents which will bind to the protein; one or more column steps over such affinity resins as concanavalin A-agarose, heparin-toyopearl® or Cibacrom blue 3GA Sepharose®; one or more steps involving hydrophobic interaction chromatography using such resins as phenyl ether, butyl ether, or propyl ether; or immunoaffinity chromatography.

[0053] Alternatively, the protein of the invention may also be expressed in a form which will facilitate purification. For example, it may be expressed as a fusion protein, such as those of maltose binding protein (MBP), glutathione-S-transferase (GST) or thioredoxin (TRX). Kits for expression and purification of such fusion proteins are commercially available from New England BioLabs (Beverly, Mass.), Pharmacia (Piscataway, N.J.) and Invitrogen Corporation (Carlsbad, Calif.), respectively. The protein can also be tagged with an epitope and subsequently purified by using a specific antibody directed to such epitope. One such epitope (“Flag”) is commercially available from the Eastman Kodak Company (New Haven, Conn.).

[0054] Finally, one or more reverse-phase high performance liquid chromatography (RP-HPLC) steps employing hydrophobic RP-HPLC media, e.g., silica gel having pendant methyl or other aliphatic groups, can be employed to further purify the protein. Some or all of the foregoing purification steps, in various combinations, can also be employed to provide a substantially homogeneous isolated recombinant protein. The protein thus purified is substantially free of other mammalian proteins and is defined in accordance with the present invention as an “isolated protein.”

[0055] The protein of the invention may also be expressed as a product of transgenic animals, e.g., as a component of the milk of transgenic cows, goats, pigs, or sheep which are characterized by somatic or germ cells containing a nucleotide sequence encoding the protein.

[0056] The protein may also be produced by known conventional chemical synthesis. Methods for constructing the proteins of the present invention by synthetic means are known to those skilled in the art. The synthetically-constructed protein sequences, by virtue of sharing primary, secondary or tertiary structural and/or conformational characteristics with proteins may possess biological properties in common therewith, including protein activity. Thus, they may be employed as biologically active or immunological substitutes for natural, purified proteins in screening of therapeutic compounds and in immunological processes for the development of antibodies.

[0057] The proteins provided herein also include proteins characterized by amino acid sequences similar to those of purified proteins but into which modification are naturally provided or deliberately engineered. For example, modifications in the peptide or DNA sequences can be made by those skilled in the art using known techniques. Modifications of interest in the protein sequences may include the alteration, substitution, replacement, insertion or deletion of a selected amino acid residue in the coding sequence. For example, one or more of the cysteine residues may be deleted or replaced with another amino acid to alter the conformation of the molecule. Techniques for such alteration, substitution, replacement, insertion or deletion are well known to those skilled in the art (see, e.g., U.S. Pat. No. 4,518,584). Preferably, such alteration, substitution, replacement, insertion or deletion retains the desired activity of the protein.

[0058] Other fragments and derivatives of the sequences of proteins which would be expected to retain protein activity in whole or in part and may thus be useful for screening or other immunological methodologies may also be easily made by those skilled in the art given the disclosures herein. Such modifications are believed to be encompassed by the present invention.

### USES AND BIOLOGICAL ACTIVITY

[0059] The polynucleotides and proteins of the present invention are expected to exhibit one or more of the uses or biological activities (including those associated with assays cited herein) identified below. Uses or activities described for proteins of the present invention may be provided by administration or use of such proteins or by administration or use of polynucleotides encoding such proteins (such as, for example, in gene therapies or vectors suitable for introduction of DNA).

[0060] Research Uses and Utilities

[0061] The polynucleotides provided by the present invention can be used by the research community for various purposes. The primary use of polynucleotides of the invention which are sESTs is as porbes for the identification and isolation of full-length cDNAs and genomic DNA molecules which correspond (i.e., is a longer polynucleotide sequence of which substantially the entire sEST is a fragment in the case of a full-length cDNA, or which encodes the sEST in the case of a genomic DNA molecule) to such sESTs. Techniques for use of such sequences as probes for larger cDNAs or genomic molecules are well known in the art.

[0062] The polynucleotides can also be used to express recombinant protein for analysis, characterization or therapeutic use; as markers for tissues in which the corresponding protein is preferentially expressed (either constitutively or at a particular stage of tissue differentiation or development or in disease states); as molecular weight markers on Southern gels; as chromosome markers or tags (when labeled) to identify chromosomes or to map related gene positions; to compare with endogenous DNA sequences in patients to identify potential genetic disorders; as probes to hybridize and thus discover novel, related DNA sequences; as a source of information to derive PCR primers for genetic fingerprinting; as a probe to “subtract- out” known sequences in the process of discovering other novel polynucleotides; for selecting and making oligomers for attachment to a “gene chip” or other support, including for examination of expression patterns; to raise anti-protein antibodies using DNA immunization techniques; and as an antigen to raise anti-DNA antibodies or elicit another immune response. Where the polynucleotide encodes a protein which binds or potentially binds to another protein (such as, for example, in a receptor-ligand interaction), the polynucleotide can also be used in interaction trap assays (such as, for example, that described in Gyuris et al., Cell 75:791-803 (1993)) to identify polynucleotides encoding the other protein with which binding occurs or to identify inhibitors of the binding interaction.

[0063] The proteins provided by the present invention can similarly be used in assay to determine biological activity, including in a panel of multiple proteins for high-throughput screening; to raise antibodies or to elicit another immune response; as a reagent (including the labeled reagent) in assays designed to quantitatively determine levels of the protein (or its receptor) in biological fluids; as markers for tissues in which the corresponding protein is preferentially expressed (either constitutively or at a particular stage of tissue differentiation or development or in a disease state); and, of course, to isolate correlative receptors or ligands. Where the protein binds or potentially binds to another protein (such as, for example, in a receptor-ligand interaction), the protein can be used to identify the other protein with which binding occurs or to identify inhibitors of the binding interaction. Proteins involved in these binding interactions can also be used to screen for peptide or small molecule inhibitors or agonists of the binding interaction.

[0064] Any or all of these research utilities are capable of being developed into reagent grade or kit format for commercialization as research products.

[0065] Methods for performing the uses listed above are well known to those skilled in the art. References disclosing such methods include without limitation “Molecular Cloning: A Laboratory Manual”, 2d ed., Cold Spring Harbor Laboratory Press, Sambrook, J., E. F. Fritsch and T. Maniatis eds., 1989, and “Methods in Enzymology: Guide to Molecular Cloning Techniques”, Academic Press, Berger, S. L. and A. R. Kimmel eds., 1987.

[0066] Nutritional Uses

[0067] Polynucleotides and proteins of the present invention can also be used as nutritional sources or supplements. Such uses include without limitation use as a protein or amino acid supplement, use as a carbon source, use as a nitrogen source and use as a source of carbohydrate. In such cases the protein or polynucleotide of the invention can be added to the feed of a particular organism or can be administered as a separate solid or liquid preparation, such as in the form of powder, pills, solutions, suspensions or capsules. In the case of microorganisms, the protein or polynucleotide of the invention can be added to the medium in or on which the microorganism is cultured.

[0068] Cytokine and Cell Proliferation/Differentiation Activity

[0069] A protein of the present invention may exhibit cytokine, cell proliferation (either inducing or inhibiting) or cell differentiation (either inducing or inhibiting) activity or may induce production of other cytokines in certain cell populations. Many protein factors discovered to date, including all known cytokines, have exhibited activity in one or more factor dependent cell proliferation assays, and hence the assays serve as a convenient confirmation of cytokine activity. The activity of a protein of the present invention is evidenced by any one of a number of routine factor dependent cell proliferation assays for cell lines including, without limitation, 32D, DA2, DA1G, T10, B9, B9/11, BaF3, MC9/G, M+ (preB M+), 2E8, RB5, DA1, 123, T1165, HT2, CTLL2, TF-1, Mo7e and CMK.

[0070] The activity of a protein of the invention may, among other means, be measured by the following methods:

[0071] Assays for T-cell or thymocyte proliferation include without limitation those described in: Current Protocols in Immunology, Ed by J. E. Coligan, A. M. Kruisbeek, D. H. Margulies, E. M. Shevach, W Strober, Pub. Greene Publishing Associates and Wiley-Interscience (Chapter 3, In Vitro assays for Mouse Lymphocyte Function 3.1-3.19; Chapter 7, Immunologic studies in Humans); Takai et al., J. Immunol. 137:3494-3500, 1986; Bertagnolli et al., J. Immunol. 145:1706-1712, 1990; Bertagnolli et al., Cellular Immunology 133:327-341, 1991; Bertagnolli, et al., J. Immunol. 149:3778-3783, 1992; Bowman et al., J. Immunol. 152: 1756-1761, 1994.

[0072] Assays for cytokine production and/or proliferation of spleen cells, lymph node cells or thymocytes include, without limitation, those described in: Polyclonal T cell stimulation, Kruisbeek, A. M. and Shevach, E. M. In Current Protocols in Immunology. J. E. e. a. Coligan eds. Vol 1 pp. 3.12.1-3.12.14, John Wiley and Sons, Toronto. 1994; and Measurement of mouse and human Interferon γ, Schreiber, R. D. In Current Protocols in Immunology. J. E. e. a. Coligan eds. Vol 1 pp. 6.8.1-6.8.8, John Wiley and Sons, Toronto. 1994.

[0073] Assays for proliferation and differentiation of hematopoietic and lymphopoietic cells include, without limitation, those described in: Measurement of Human and Murine Interleukin 2 and Interleukin 4, Bottomly, K., Davis, L. S. and Lipsky, P. E. In Current Protocols in Immunology. J. E. e. a. Coligan eds. Vol 1 pp. 6.3.1-6.3.12, John Wiley and Sons, Toronto. 1991; deVries et al., J. Exp. Med. 173:1205-1211, 1991; Moreau et al., Nature 336:690-692, 1988; Greenberger et al., Proc. Natl. Acad. Sci. U.S.A. 80:2931-2938, 1983; Measurement of mouse and human interleukin 6-Nordan, R. In Current Protocols in Immunology. J. E. e. a. Coligan eds. Vol 1 pp. 6.6.1-6.6.5, John Wiley and Sons, Toronto. 1991; Smith et al., Proc. Natl. Acad. Sci. U.S.A. 83:1857-1861, 1986; Measurement of human Interleukin 11-Bennett, F., Giannotti, J., Clark, S. C. and Turner, K. J. In Current Protocols in Immunology. J. E. e. a. Coligan eds. Vol 1 pp. 6.15.1 John Wiley and Sons, Toronto. 1991; Measurement of mouse and human Interleukin 9-Ciarletta, A., Giannotti, J., Clark, S. C. and Turner, K. J. In Current Protocols in Immunology. J. E. e. a. Coligan eds. Vol 1 pp. 6.13.1, John Wiley and Sons, Toronto. 1991.

[0074] Assays for T-cell clone responses to antigens (which will identify, among others, proteins that affect APC-T cell interactions as well as direct T-cell effects by measuring proliferation and cytokine production) include, without limitation, those described in: Current Protocols in Immunology, Ed by J. E. Coligan, A.M. Kruisbeek, D. H. Margulies, E. M. Shevach, W Strober, Pub. Greene Publishing Associates and Wiley-Interscience (Chapter 3, In Vitro assays for Mouse Lymphocyte Function; Chapter 6, Cytokines and their cellular receptors; Chapter 7, Immunologic studies in Humans); Weinberger et al., Proc. Natl. Acad. Sci. USA 77:6091-6095, 1980; Weinberger et al., Eur. J. Immun. 11:405-411, 1981; Takai et al., J. Immunol. 137:3494-3500, 1986; Takai et al., J. Immunol. 140:508-512, 1988.

[0075] Immune Stimulating or Suppressing Activity

[0076] A protein of the present invention may also exhibit immune stimulating or immune suppressing activity, including without limitation the activities for which assays are described herein. A protein may be useful in the treatment of various immune deficiencies and disorders (including severe combined immunodeficiency (SCID)), e.g., in regulating (up or down) growth and proliferation of T and/or B lymphocytes, as well as effecting the cytolytic activity of NK cells and other cell populations. These immune deficiencies may be genetic or be caused by viral (e.g., HIV) as well as bacterial or fungal infections, or may result from autoimmune disorders. More specifically, infectious diseases causes by viral, bacterial, fungal or other infection may be treatable using a protein of the present invention, including infections by HIV, hepatitis viruses, herpesviruses, mycobacteria, Leishmania spp., malaria spp. and various fungal infections such as candidiasis. Of course, in this regard, a protein of the present invention may also be useful where a boost to the immune system generally may be desirable, i.e., in the treatment of cancer.

[0077] Autoimmune disorders which may be treated using a protein of the present invention include, for example, connective tissue disease, multiple sclerosis, systemic lupus erythematosus, rheumatoid arthritis, autoimmune pulmonary inflammation, Guillain-Barre syndrome, autoimmune thyroiditis, insulin dependent diabetes mellitis, myasthenia gravis, graft-versus-host disease and autoimmune inflammatory eye disease. Such a protein of the present invention may also to be useful in the treatment of allergic reactions and conditions, such as asthma (particularly allergic asthma) or other respiratory problems. Other conditions, in which immune suppression is desired (including, for example, organ transplantation), may also be treatable using a protein of the present invention.

[0078] Using the proteins of the invention it may also be possible to immune responses, in a number of ways. Down regulation may be in the form of inhibiting or blocking an immune response already in progress or may involve preventing the induction of an immune response. The functions of activated T cells may be inhibited by suppressing T cell responses or by inducing specific tolerance in T cells, or both. Immunosuppression of T cell responses is generally an active, non-antigen-specific, process which requires continuous exposure of the T cells to the suppressive agent. Tolerance, which involves inducing non-responsiveness or anergy in T cells, is distinguishable from immunosuppression in that it is generally antigen-specific and persists after exposure to the tolerizing agent has ceased. Operationally, tolerance can be demonstrated by the lack of a T cell response upon reexposure to specific antigen in the absence of the tolerizing agent.

[0079] Down regulating or preventing one or more antigen functions (including without limitation B lymphocyte antigen functions (such as, for example, B7)), e.g., preventing high level lymphokine synthesis by activated T cells, will be useful in situations of tissue, skin and organ transplantation and in graft-versus-host disease (GVHD). For example, blockage of T cell function should result in reduced tissue destruction in tissue transplantation. Typically, in tissue transplants, rejection of the transplant is initiated through its recognition as foreign by T cells, followed by an immune reaction that destroys the transplant. The administration of a molecule which inhibits or blocks interaction of a B7 lymphocyte antigen with its natural ligand(s) on immune cells (such as a soluble, monomeric form of a peptide having B7-2 activity alone or in conjunction with a monomeric form of a peptide having an activity of another B lymphocyte antigen (e.g., B7-1, B7-3) or blocking antibody), prior to transplantation can lead to the binding of the molecule to the natural ligand(s) on the immune cells without transmitting the corresponding costimulatory signal. Blocking B lymphocyte antigen function in this matter prevents cytokine synthesis by immune cells, such as T cells, and thus acts as an immunosuppressant. Moreover, the lack of costimulation may also be sufficient to anergize the T cells, thereby inducing tolerance in a subject. Induction of long-term tolerance by B lymphocyte antigen-blocking reagents may avoid the necessity of repeated administration of these blocking reagents. To achieve sufficient immunosuppression or tolerance in a subject, it may also be necessary to block the function of a combination of B lymphocyte antigens.

[0080] The efficacy of particular blocking reagents in preventing organ transplant rejection or GVHD can be assessed using animal models that are predictive of efficacy in humans. Examples of appropriate systems which can be used include allogeneic cardiac grafts in rats and xenogeneic pancreatic islet cell grafts in mice, both of which have been used to examine the immunosuppressive effects of CTLA4Ig fusion proteins in vivo as described in Lenschow et al., Science 257:789-792 (1992) and Turka et al., Proc. Natl. Acad. Sci USA, 89:11102-11105 (1992). In addition, murine models of GVHD (see Paul ed., Fundamental Immunology, Raven Press, New York, 1989, pp. 846-847) can be used to determine the effect of blocking B lymphocyte antigen function in vivo on the development of that disease.

[0081] Blocking antigen function may also be therapeutically useful for treating autoimmune diseases. Many autoimmune disorders are the result of inappropriate activation of T cells that are reactive against self tissue and which promote the production of cytokines and autoantibodies involved in the pathology of the diseases. Preventing the activation of autoreactive T cells may reduce or eliminate disease symptoms. Administration of reagents which block costimulation of T cells by disrupting receptor:ligand interactions of B lymphocyte antigens can be used to inhibit T cell activation and prevent production of autoantibodies or T cell-derived cytokines which may be involved in the disease process. Additionally, blocking reagents may induce antigen-specific tolerance of autoreactive T cells which could lead to long-term relief from the disease. The efficacy of blocking reagents in preventing or alleviating autoimmune disorders can be determined using a number of well-characterized animal models of human autoimmune diseases. Examples include murine experimental autoimmune encephalitis, systemic lupus erythmatosis in MRL/lpr/lpr mice or NZB hybrid mice, murine autoimmune collagen arthritis, diabetes mellitus in NOD mice and BB rats, and murine experimental myasthenia gravis (see Paul ed., Fundamental Immunology, Raven Press, New York, 1989, pp. 840-856).

[0082] Upregulation of an antigen function (preferably a B lymphocyte antigen function), as a means of up regulating immune responses, may also be useful in therapy. Upregulation of immune responses may be in the form of enhancing an existing immune response or eliciting an initial immune response. For example, enhancing an immune response through stimulating B lymphocyte antigen function may be useful in cases of viral infection. In addition, systemic viral diseases such as influenza, the common cold, and encephalitis might be alleviated by the administration of stimulatory forms of B lymphocyte antigens systemically.

[0083] Alternatively, anti-viral immune responses may be enhanced in an infected patient by removing T cells from the patient, costimulating the T cells in vitro with viral antigen-pulsed APCs either expressing a peptide of the present invention or together with a stimulatory form of a soluble peptide of the present invention and reintroducing the in vitro activated T cells into the patient. Another method of enhancing anti-viral immune responses would be to isolate infected cells from a patient, transfect them with a nucleic acid encoding a protein of the present invention as described herein such that the cells express all or a portion of the protein on their surface, and reintroduce the transfected cells into the patient. The infected cells would now be capable of delivering a costimulatory signal to, and thereby activate, T cells in vivo.

[0084] In another application, up regulation or enhancement of antigen function (preferably B lymphocyte antigen function) may be useful in the induction of tumor immunity. Tumor cells (e.g., sarcoma, melanoma, lymphoma, leukemia, neuroblastoma, carcinoma) transfected with a nucleic acid encoding at least one peptide of the present invention can be administered to a subject to overcome tumor-specific tolerance in the subject. If desired, the tumor cell can be transfected to express a combination of peptides. For example, tumor cells obtained from a patient can be transfected ex vivo with an expression vector directing the expression of a peptide having B7-2-like activity alone, or in conjunction with a peptide having B7-1-like activity and/or B7-3-like activity. The transfected tumor cells are returned to the patient to result in expression of the peptides on the surface of the transfected cell. Alternatively, gene therapy techniques can be used to target a tumor cell for transfection in vivo.

[0085] The presence of the peptide of the present invention having the activity of a B lymphocyte antigen(s) on the surface of the tumor cell provides the necessary costimulation signal to T cells to induce a T cell mediated immune response against the transfected tumor cells. In addition, tumor cells which lack MHC class I or MHC class II molecules, or which fail to reexpress sufficient amounts of MHC class I or MHC class II molecules, can be transfected with nucleic acid encoding all or a portion of (e.g., a cytoplasmic-domain truncated portion) of an MHC class Iα chain protein and β₂ microglobulin protein or an MHC class IIα chain protein and an MHC class IIβ chain protein to thereby express MHC class I or MHC class II proteins on the cell surface. Expression of the appropriate class I or class II MHC in conjunction with a peptide having the activity of a B lymphocyte antigen (e.g., B7-1, B7-2, B7-3) induces a T cell mediated immune response against the transfected tumor cell. Optionally, a gene encoding an antisense construct which blocks expression of an MHC class II associated protein, such as the invariant chain, can also be cotransfected with a DNA encoding a peptide having the activity of a B lymphocyte antigen to promote presentation of tumor associated antigens and induce tumor specific immunity. Thus, the induction of a T cell mediated immune response in a human subject may be sufficient to overcome tumor-specific tolerance in the subject.

[0086] The activity of a protein of the invention may, among other means, be measured by the following methods:

[0087] Suitable assays for thymocyte or splenocyte cytotoxicity include, without limitation, those described in: Current Protocols in Immunology, Ed by J. E. Coligan, A. M. Kruisbeek, D. H. Margulies, E. M. Shevach, W Strober, Pub. Greene Publishing Associates and Wiley-Interscience (Chapter 3, In Vitro assays for Mouse Lymphocyte Function 3.1-3.19; Chapter 7, Immunologic studies in Humans); Herrmann et al., Proc. Natl. Acad. Sci. USA 78:2488-2492, 1981; Herrmann et al., J. Immunol. 128:1968-1974, 1982; Handa et al., J. Immunol. 135:1564-1572, 1985; Takai et al., J. Immunol. 137:3494-3500, 1986; Takai et al., J. Immunol. 140:508-512, 1988; Herrmann et al., Proc. Natl. Acad. Sci. USA 78:2488-2492, 1981; Herrmann et al., J. Immunol. 128:1968-1974, 1982; Handa et al., J. Immunol. 135:1564-1572, 1985; Takai et al., J. Immunol. 137:3494-3500, 1986; Bowmanet al., J. Virology 61:1992-1998; Takai et al., J. Immunol. 140:508-512, 1988; Bertagnolli et al., Cellular Immunology 133:327-341, 1991; Brown et al., J. Immunol. 153:3079-3092, 1994.

[0088] Assays for T-cell-dependent immunoglobulin responses and isotype switching (which will identify, among others, proteins that modulate T-cell dependent antibody responses and that affect Th1/Th2 profiles) include, without limitation, those described in: Maliszewski, J. Immunol. 144:3028-3033, 1990; and Assays for B cell function: In vitro antibody production, Mond, J. J. and Brunswick, M. In Current Protocols in Immunology. J. E. e. a. Coligan eds. Vol 1 pp. 3.8.1-3.8.16, John Wiley and Sons, Toronto. 1994.

[0089] Mixed lymphocyte reaction (MLR) assays (which will identify, among others, proteins that generate predominantly Th1 and CTL responses) include, without limitation, those described in: Current Protocols in Immunology, Ed by J. E. Coligan, A. M. Kruisbeek, D. H. Margulies, E. M. Shevach, W Strober, Pub. Greene Publishing Associates and Wiley-Interscience (Chapter 3, In Vitro assays for Mouse Lymphocyte Function 3.1-3.19; Chapter 7, Immunologic studies in Humans); Takai et al., J. Immunol. 137:3494-3500, 1986; Takai et al., J. Immunol. 140:508-512, 1988; Bertagnolli et al., J. Immunol. 149:3778-3783, 1992.

[0090] Dendritic cell-dependent assays (which will identify, among others, proteins expressed by dendritic cells that activate naive T-cells) include, without limitation, those described in: Guery et al., J. Immunol. 134:536-544, 1995; Inaba et al., Journal of Experimental Medicine 173:549-559, 1991; Macatonia et al., Journal of Immunology 154:5071-5079, 1995; Porgador et al., Journal of Experimental Medicine 182:255-260, 1995; Nair et al., Journal of Virology 67:4062-4069, 1993; Huang et al., Science 264:961-965, 1994; Macatonia et al., Journal of Experimental Medicine 169:1255-1264, 1989; Bhardwaj et al., Journal of Clinical Investigation 94:797-807, 1994; and Inaba et al., Journal of Experimental Medicine 172:631-640, 1990.

[0091] Assays for lymphocyte survival/apoptosis (which will identify, among others, proteins that prevent apoptosis after superantigen induction and proteins that regulate lymphocyte homeostasis) include, without limitation, those described in: Darzynkiewicz et al., Cytometry 13:795-808, 1992; Gorczyca et al., Leukemia 7:659-670, 1993; Gorczyca et al., Cancer Research 53:1945-1951, 1993; Itoh et al., Cell 66:233-243, 1991; Zacharchuk, Journal of Immunology 145:4037-4045, 1990; Zamai et al., Cytometry 14:891-897, 1993; Gorczyca et al., International Journal of Oncology 1:639-648, 1992.

[0092] Assays for proteins that influence early steps of T-cell commitment and development include, without limitation, those described in: Antica et al., Blood 84:111-117, 1994; Fine et al., Cellular Immunology 155:111-122, 1994; Galy et al., Blood 85:2770-2778, 1995; Toki et al., Proc. Nat. Acad Sci. USA 88:7548-7551, 1991.

[0093] Hematopoiesis Regulating Activity

[0094] A protein of the present invention may be useful in regulation of hematopoiesis and, consequently, in the treatment of myeloid or lymphoid cell deficiencies. Even marginal biological activity in support of colony forming cells or of factor-dependent cell lines indicates involvement in regulating hematopoiesis, e.g. in supporting the growth and proliferation of erythroid progenitor cells alone or in combination with other cytokines, thereby indicating utility, for example, in treating various anemias or for use in conjunction with irradiation/chemotherapy to stimulate the production of erythroid precursors and/or erythroid cells; in supporting the growth and proliferation of myeloid cells such as granulocytes and monocytes/macrophages (i.e., traditional CSF activity) useful, for example, in conjunction with chemotherapy to prevent or treat consequent myelo-suppression; in supporting the growth and proliferation of megakaryocytes and consequently of platelets thereby allowing prevention or treatment of various platelet disorders such as thrombocytopenia, and generally for use in place of or complimentary to platelet transfusions; and/or in supporting the growth and proliferation of hematopoietic stem cells which are capable of maturing to any and all of the above-mentioned hematopoietic cells and therefore find therapeutic utility in various stem cell disorders (such as those usually treated with transplantation, including, without limitation, aplastic anemia and paroxysmal nocturnal hemoglobinuria), as well as in repopulating the stem cell compartment post irradiation/chemotherapy, either in-vivo or ex-vivo (i.e., in conjunction with bone marrow transplantation or with peripheral progenitor cell transplantation (homologous or heterologous)) as normal cells or genetically manipulated for gene therapy.

[0095] The activity of a protein of the invention may, among other means, be measured by the following methods:

[0096] Suitable assays for proliferation and differentiation of various hematopoietic lines are cited above.

[0097] Assays for embryonic stem cell differentiation (which will identify, among others, proteins that influence embryonic differentiation hematopoiesis) include, without limitation, those described in: Johansson et al. Cellular Biology 15:141-151, 1995; Keller et al., Molecular and Cellular Biology 13:473-486, 1993; McClanahan et al., Blood 81:2903-2915, 1993.

[0098] Assays for stem cell survival and differentiation (which will identify, among others, proteins that regulate lympho-hematopoiesis) include, without limitation, those described in: Methylcellulose colony forming assays, Freshney, M. G. In Culture of Hematopoietic Cells. R. I. Freshney, et al. eds. Vol pp. 265-268, Wiley-Liss, Inc., New York, N.Y. 1994; Hirayama et al., Proc. Natl. Acad. Sci. USA 89:5907-5911, 1992; Primitive hematopoietic colony forming cells with high proliferative potential, McNiece, I. K. and Briddell, R. A. In Culture of Hematopoietic Cells. R. I. Freshney, et al. eds. Vol pp. 23-39, Wiley-Liss, Inc., New York, N.Y. 1994; Neben et al., Experimental Hematology 22:353-359, 1994; Cobblestone area forming cell assay, Floemacher, R. E. In Culture of Hematopoietic Cells. R. I. Freshney, et al. eds. Vol pp. 1-21, Wiley-Liss, Inc.., New York, N.Y. 1994; Long term bone marrow cultures in the presence of stromal cells, Spooncer, E., Dexter, M. and Allen, T. In Culture of Hematopoietic Cells. R. I. Freshney, et al. eds. Vol pp. 163-179, Wiley-Liss, Inc., New York, N.Y. 1994; Long term culture initiating cell assay, Sutherland, H. J. In Culture of Hematopoietic Cells. R. I. Freshney, et al. eds. Vol pp. 139-162, Wiley-Liss, Inc., New York, N.Y. 1994.

[0099] Tissue Growth Activity

[0100] A protein of the present invention also may have utility in compositions used for bone, cartilage, tendon, ligament and/or nerve tissue growth or regeneration, as well as for wound healing and tissue repair and replacement, and in the treatment of burns, incisions and ulcers.

[0101] A protein of the present invention, which induces cartilage and/or bone growth in circumstances where bone is not normally formed, has application in the healing of bone fractures and cartilage damage or defects in humans and other animals. Such a preparation employing a protein of the invention may have prophylactic use in closed as well as open fracture reduction and also in the improved fixation of artificial joints. De novo bone formation induced by an osteogenic agent contributes to the repair of congenital, trauma induced, or oncologic resection induced craniofacial defects, and also is useful in cosmetic plastic surgery.

[0102] A protein of this invention may also be used in the treatment of periodontal disease, and in other tooth repair processes. Such agents may provide an environment to attract bone-forming cells, stimulate growth of bone-forming cells or induce differentiation of progenitors of bone-forming cells. A protein of the invention may also be useful in the treatment of osteoporosis or osteoarthritis, such as through stimulation of bone and/or cartilage repair or by blocking inflammation or processes of tissue destruction (collagenase activity, osteoclast activity, etc.) mediated by inflammatory processes.

[0103] Another category of tissue regeneration activity that may be attributable to the protein of the present invention is tendon/ligament formation. A protein of the present invention, which induces tendon/ligament-like tissue or other tissue formation in circumstances where such tissue is not normally formed, has application in the healing of tendon or ligament tears, deformities and other tendon or ligament defects in humans and other animals. Such a preparation employing a tendon/ligament-like tissue inducing protein may have prophylactic use in preventing damage to tendon or ligament tissue, as well as use in the improved fixation of tendon or ligament to bone or other tissues, and in repairing defects to tendon or ligament tissue. De novo tendon/ligament-like tissue formation induced by a composition of the present invention contributes to the repair of congenital, trauma induced, or other tendon or ligament defects of other origin, and is also useful in cosmetic plastic surgery for attachment or repair of tendons or ligaments. The compositions of the present invention may provide an environment to attract tendon- or ligament-forming cells, stimulate growth of tendon- or ligament-forming cells, induce differentiation of progenitors of tendon- or ligament-forming cells, or induce growth of tendon/ligament cells or progenitors ex vivo for return in vivo to effect tissue repair. The compositions of the invention may also be useful in the treatment of tendinitis, carpal tunnel syndrome and other tendon or ligament defects. The compositions may also include an appropriate matrix and/or sequestering agent as a carrier as is well known in the art.

[0104] The protein of the present invention may also be useful for proliferation of neural cells and for regeneration of nerve and brain tissue, i.e. for the treatment of central and peripheral nervous system diseases and neuropathies, as well as mechanical and traumatic disorders, which involve degeneration, death or trauma to neural cells or nerve tissue. More specifically, a protein may be used in the treatment of diseases of the peripheral nervous system, such as peripheral nerve injuries, peripheral neuropathy and localized neuropathies, and central nervous system diseases, such as Alzheimer's, Parkinson's disease, Huntington's disease, amyotrophic lateral sclerosis, and Shy-Drager syndrome. Further conditions which may be treated in accordance with the present invention include mechanical and traumatic disorders, such as spinal cord disorders, head trauma and cerebrovascular diseases such as stroke. Peripheral neuropathies resulting from chemotherapy or other medical therapies may also be treatable using a protein of the invention.

[0105] Proteins of the invention may also be useful to promote better or faster closure of non-healing wounds, including without limitation pressure ulcers, ulcers associated with vascular insufficiency, surgical and traumatic wounds, and the like.

[0106] It is expected that a protein of the present invention may also exhibit activity for generation or regeneration of other tissues, such as organs (including, for example, pancreas, liver, intestine, kidney, skin, endothelium), muscle (smooth, skeletal or cardiac) and vascular (including vascular endothelium) tissue, or for promoting the growth of cells comprising such tissues. Part of the desired effects may be by inhibition or modulation of fibrotic scarring to allow normal tissue to regenerate. A protein of the invention may also exhibit angiogenic activity.

[0107] A protein of the present invention may also be useful for gut protection or regeneration and treatment of lung or liver fibrosis, reperfusion injury in various tissues, and conditions resulting from systemic cytokine damage.

[0108] A protein of the present invention may also be useful for promoting or inhibiting differentiation of tissues described above from precursor tissues or cells; or for inhibiting the growth of tissues described above.

[0109] The activity of a protein of the invention may, among other means, be measured by the following methods:

[0110] Assays for tissue generation activity include, without limitation, those described in: International Patent Publication No. WO95/16035 (bone, cartilage, tendon); International Patent Publication No. WO95/05846 (nerve, neuronal); International Patent Publication No. WO91/07491 (skin, endothelium ).

[0111] Assays for wound healing activity include, without limitation, those described in: Winter, Epidermal Wound Healing, pps. 71-112 (Maibach, H I and Rovee, D T, eds.), Year Book Medical Publishers, Inc., Chicago, as modified by Eaglstein and Mertz, J. Invest. Dermatol 71:382-84 (1978).

[0112] Activin/Inhibin Activity

[0113] A protein of the present invention may also exhibit activin- or inhibin-related activities. Inhibins are characterized by their ability to inhibit the release of follicle stimulating hormone (FSH), while activins and are characterized by their ability to stimulate the release of follicle stimulating hormone (FSH). Thus, a protein of the present invention, alone or in heterodimers with a member of the inhibin α family, may be useful as a contraceptive based on the ability of inhibins to decrease fertility in female mammals and decrease spermatogenesis in male mammals. Administration of sufficient amounts of other inhibins can induce infertility in these mammals. Alternatively, the protein of the invention, as a homodimer or as a heterodimer with other protein subunits of the inhibin-β group, may be useful as a fertility inducing therapeutic, based upon the ability of activin molecules in stimulating FSH release from cells of the anterior pituitary. See, for example, United States Patent 4,798,885. A protein of the invention may also be useful for advancement of the onset of fertility in sexually immature mammals, so as to increase the lifetime reproductive performance of domestic animals such as cows, sheep and pigs.

[0114] The activity of a protein of the invention may, among other means, be measured by the following methods:

[0115] Assays for activin/inhibin activity include, without limitation, those described in: Vale et al., Endocrinology 91:562-572, 1972; Ling et al., Nature 321:779- 782, 1986; Vale et al., Nature 321:776-779, 1986; Mason et al., Nature 318:659-663, 1985; Forage et al., Proc. Natl. Acad. Sci. USA 83:3091-3095, 1986.

[0116] Chemotactic/Chemokinetic Activity

[0117] A protein of the present invention may have chemotactic or chemokinetic activity (e.g., act as a chemokine) for mammalian cells, including, for example, monocytes, fibroblasts, neutrophils, T-cells, mast cells, eosinophils, epithelial and/or endothelial cells. Chemotactic and chemokinetic proteins can be used to mobilize or attract a desired cell population to a desired site of action. Chemotactic or chemokinetic proteins provide particular advantages in treatment of wounds and other trauma to tissues, as well as in treatment of localized infections. For example, attraction of lymphocytes, monocytes or neutrophils to tumors or sites of infection may result in improved immune responses against the tumor or infecting agent.

[0118] A protein or peptide has chemotactic activity for a particular cell population if it can stimulate, directly or indirectly, the directed orientation or movement of such cell population. Preferably, the protein or peptide has the ability to directly stimulate directed movement of cells. Whether a particular protein has chemotactic activity for a population of cells can be readily determined by employing such protein or peptide in any known assay for cell chemotaxis.

[0119] The activity of a protein of the invention may, among other means, be measured by the following methods:

[0120] Assays for chemotactic activity (which will identify proteins that induce or prevent chemotaxis) consist of assays that measure the ability of a protein to induce the migration of cells across a membrane as well as the ability of a protein to induce the adhesion of one cell population to another cell population. Suitable assays for movement and adhesion include, without limitation, those described in: Current Protocols in Immunology, Ed by J. E. Coligan, A. M. Kruisbeek, D. H. Margulies, E. M. Shevach, W. Strober, Pub. Greene Publishing Associates and Wiley-Interscience (Chapter 6.12, Measurement of alpha and beta Chemokines 6.12.1-6.12.28; Taub et al. J. Clin. Invest. 95:1370-1376, 1995; Lind et al. APMIS 103:140-146, 1995; Muller et al Eur. J. Immunol. 25: 1744-1748; Gruber et al. J. of Immunol. 152:5860-5867, 1994; Johnston et al. J. of Immunol. 153: 1762-1768, 1994.

[0121] Hemostatic and Thrombolytic Activity

[0122] A protein of the invention may also exhibit hemostatic or thrombolytic activity. As a result, such a protein is expected to be useful in treatment of various coagulation disorders (including hereditary disorders, such as hemophilias) or to enhance coagulation and other hemostatic events in treating wounds resulting from trauma, surgery or other causes. A protein of the invention may also be useful for dissolving or inhibiting formation of thromboses and for treatment and prevention of conditions resulting therefrom (such as, for example, infarction of cardiac and central nervous system vessels (e.g., stroke).

[0123] The activity of a protein of the invention may, among other means, be measured by the following methods:

[0124] Assay for hemostatic and thrombolytic activity include, without limitation, those described in: Linet et al., J. Clin. Pharmacol. 26:131-140, 1986; Burdick et al., Thrombosis Res. 45:413-419, 1987; Humphrey et al., Fibrinolysis 5:71-79 (1991); Schaub, Prostaglandins 35:467-474, 1988.

[0125] Receptor/Ligand Activity

[0126] A protein of the present invention may also demonstrate activity as receptors, receptor ligands or inhibitors or agonists of receptor/ligand interactions. Examples of such receptors and ligands include, without limitation, cytokine receptors and their ligands, receptor kinases and their ligands, receptor phosphatases and their ligands, receptors involved in cell-cell interactions and their ligands (including without limitation, cellular adhesion molecules (such as selectins, integrins and their ligands) and receptor/ligand pairs involved in antigen presentation, antigen recognition and development of cellular and humoral immune responses). Receptors and ligands are also useful for screening of potential peptide or small molecule inhibitors of the relevant receptor/ligand interaction. A protein of the present invention (including, without limitation, fragments of receptors and ligands) may themselves be useful as inhibitors of receptor/ligand interactions.

[0127] The activity of a protein of the invention may, among other means, be measured by the following methods:

[0128] Suitable assays for receptor-ligand activity include without limitation those described in: Current Protocols in Immunology, Ed by J. E. Coligan, A. M. Kruisbeek, D. H. Margulies, E. M. Shevach, W. Strober, Pub. Greene Publishing Associates and Wiley-Interscience (Chapter 7.28, Measurement of Cellular Adhesion under static conditions 7.28.1-7.28.22), Takai et al., Proc. Natl. Acad. Sci. USA 84:6864-6868, 1987; Bierer et al., J. Exp. Med. 168:1145-1156, 1988; Rosenstein et al., J. Exp. Med. 169:149-160 1989; Stoltenborg et al., J. Immunol. Methods 175:59-68, 1994; Stitt et al., Cell 80:661-670, 1995.

[0129] Anti-Inflammatory Activity

[0130] Proteins of the present invention may also exhibit anti-inflammatory activity. The anti-inflammatory activity may be achieved by providing a stimulus to cells involved in the inflammatory response, by inhibiting or promoting cell-cell interactions (such as, for example, cell adhesion), by inhibiting or promoting chemotaxis of cells involved in the inflammatory process, inhibiting or promoting cell extravasation, or by stimulating or suppressing production of other factors which more directly inhibit or promote an inflammatory response. Proteins exhibiting such activities can be used to treat inflammatory conditions including chronic or acute conditions), including without limitation inflammation associated with infection (such as septic shock, sepsis or systemic inflammatory response syndrome (SIRS)), ischemia-reperfusion injury, endotoxin lethality, arthritis, complement-mediated hyperacute rejection, nephritis, cytokine or chemokine-induced lung injury, inflammatory bowel disease, Crohn's disease or resulting from over production of cytokines such as TNF or IL-1. Proteins of the invention may also be useful to treat anaphylaxis and hypersensitivity to an antigenic substance or material.

[0131] Tumor Inhibition Activity

[0132] In addition to the activities described above for immunological treatment or prevention of tumors, a protein of the invention may exhibit other anti-tumor activities. A protein may inhibit tumor growth directly or indirectly (such as, for example, via ADCC). A protein may exhibit its tumor inhibitory activity by acting on tumor tissue or tumor precursor tissue, by inhibiting formation of tissues necessary to support tumor growth (such as, for example, by inhibiting angiogenesis), by causing production of other factors, agents or cell types which inhibit tumor growth, or by suppressing, eliminating or inhibiting factors, agents or cell types which promote tumor growth.

[0133] Other Activities

[0134] A protein of the invention may also exhibit one or more of the following additional activities or effects: inhibiting the growth, infection or function of, or killing, infectious agents, including, without limitation, bacteria, viruses, fungi and other parasites; effecting (suppressing or enhancing) bodily characteristics, including, without limitation, height, weight, hair color, eye color, skin, fat to lean ratio or other tissue pigmentation, or organ or body part size or shape (such as, for example, breast augmentation or diminution, change in bone form or shape); effecting biorhythms or caricadic cycles or rhythms; effecting the fertility of male or female subjects; effecting the metabolism, catabolism, anabolism, processing, utilization, storage or elimination of dietary fat, lipid, protein, carbohydrate, vitamins, minerals, cofactors or other nutritional factors or component(s); effecting behavioral characteristics, including, without limitation, appetite, libido, stress, cognition (including cognitive disorders), depression (including depressive disorders) and violent behaviors; providing analgesic effects or other pain reducing effects; promoting differentiation and growth of embryonic stem cells in lineages other than hematopoietic lineages; hormonal or endocrine activity; in the case of enzymes, correcting deficiencies of the enzyme and treating deficiency-related diseases; treatment of hyperproliferative disorders (such as, for example, psoriasis); immunoglobulin-like activity (such as, for example, the ability to bind antigens or complement); and the ability to act as an antigen in a vaccine composition to raise an immune response against such protein or another material or entity which is cross-reactive with such protein.

### ADMINISTRATION AND DOSING

[0135] A protein of the present invention (from whatever source derived, including without limitation from recombinant and non-recombinant sources) may be used in a pharmaceutical composition when combined with a pharmaceutically acceptable carrier. Such a composition may also contain (in addition to protein and a carrier) diluents, fillers, salts, buffers, stabilizers, solubilizers, and other materials well known in the art. The term “pharmaceutically acceptable” means a non-toxic material that does not interfere with the effectiveness of the biological activity of the active ingredient(s). The characteristics of the carrier will depend on the route of administration. The pharmaceutical composition of the invention may also contain cytokines, lymphokines, or other hematopoietic factors such as M-CSF, GM-CSF, TNF, IL-1, IL-2, IL-3, IL-4, IL-5, IL-6, IL-7, IL-8, IL-9, IL-10, IL-11, IL-12, IL-13, IL-14, IL-15, IFN, TNF0, TNF1, TNF2, G-CSF, Meg-CSF, thrombopoietin, stem cell factor, and erythropoietin. The pharmaceutical composition may further contain other agents which either enhance the activity of the protein or compliment its activity or use in treatment. Such additional factors and/or agents may be included in the pharmaceutical composition to produce a synergistic effect with protein of the invention, or to minimize side effects. Conversely, protein of the present invention may be included in formulations of the particular cytokine, lymphokine, other hematopoietic factor, thrombolytic or anti-thrombotic factor, or anti-inflammatory agent to minimize side effects of the cytokine, lymphokine, other hematopoietic factor, thrombolytic or anti-thrombotic factor, or anti-inflammatory agent.

[0136] A protein of the present invention may be active in multimers (e.g., heterodimers or homodimers) or complexes with itself or other proteins. As a result, pharmaceutical compositions of the invention may comprise a protein of the invention in such multimeric or complexed form.

[0137] The pharmaceutical composition of the invention may be in the form of a complex of the protein(s) of present invention along with protein or peptide antigens. The protein and/or peptide antigen will deliver a stimulatory signal to both B and T lymphocytes. B lymphocytes will respond to antigen through their surface immunoglobulin receptor. T lymphocytes will respond to antigen through the T cell receptor (TCR) following presentation of the antigen by MHC proteins. MHC and structurally related proteins including those encoded by class I and class II MHC genes on host cells will serve to present the peptide antigen(s) to T lymphocytes. The antigen components could also be supplied as purified MHC-peptide complexes alone or with co-stimulatory molecules that can directly signal T cells. Alternatively antibodies able to bind surface immunolgobulin and other molecules on B cells as well as antibodies able to bind the TCR and other molecules on T cells can be combined with the pharmaceutical composition of the invention.

[0138] The pharmaceutical composition of the invention may be in the form of a liposome in which protein of the present invention is combined, in addition to other pharmaceutically acceptable carriers, with amphipathic agents such as lipids which exist in aggregated form as micelles, insoluble monolayers, liquid crystals, or lamellar layers in aqueous solution. Suitable lipids for liposomal formulation include, without limitation, monoglycerides, diglycerides, sulfatides, lysolecithin, phospholipids, saponin, bile acids, and the like. Preparation of such liposomal formulations is within the level of skill in the art, as disclosed, for example, in U.S. Pat. No. 4,235,871; U.S. Pat. No. 4,501,728; U.S. Pat. No. 4,837,028; and U.S. Pat. No. 4,737,323, all of which are incorporated herein by reference.

[0139] As used herein, the term “therapeutically effective amount” means the total amount of each active component of the pharmaceutical composition or method that is sufficient to show a meaningful patient benefit, i.e., treatment, healing, prevention or amelioration of the relevant medical condition, or an increase in rate of treatment, healing, prevention or amelioration of such conditions. When applied to an individual active ingredient, administered alone, the term refers to that ingredient alone. When applied to a combination, the term refers to combined amounts of the active ingredients that result in the therapeutic effect, whether administered in combination, serially or simultaneously.

[0140] In practicing the method of treatment or use of the present invention, a therapeutically effective amount of protein of the present invention is administered to a mammal having a condition to be treated. Protein of the present invention may be administered in accordance with the method of the invention either alone or in combination with other therapies such as treatments employing cytokines, lymphokines or other hematopoietic factors. When co-administered with one or more cytokines, lymphokines or other hematopoietic factors, protein of the present invention may be administered either simultaneously with the cytokine(s), lymphokine(s), other hematopoietic factor(s), thrombolytic or anti-thrombotic factors, or sequentially. If administered sequentially, the attending physician will decide on the appropriate sequence of administering protein of the present invention in combination with cytokine(s), lymphokine(s), other hematopoietic factor(s), thrombolytic or anti-thrombotic factors.

[0141] Administration of protein of the present invention used in the pharmaceutical composition or to practice the method of the present invention can be carried out in a variety of conventional ways, such as oral ingestion, inhalation, topical application or cutaneous, subcutaneous, intraperitoneal, parenteral or intravenous injection. Intravenous administration to the patient is preferred.

[0142] When a therapeutically effective amount of protein of the present invention is administered orally, protein of the present invention will be in the form of a tablet, capsule, powder, solution or elixir. When administered in tablet form, the pharmaceutical composition of the invention may additionally contain a solid carrier such as a gelatin or an adjuvant. The tablet, capsule, and powder contain from about 5 to 95% protein of the present invention, and preferably from about 25 to 90% protein of the present invention. When administered in liquid form, a liquid carrier such as water, petroleum, oils of animal or plant origin such as peanut oil, mineral oil, soybean oil, or sesame oil, or synthetic oils may be added. The liquid form of the pharmaceutical composition may further contain physiological saline solution, dextrose or other saccharide solution, or glycols such as ethylene glycol, propylene glycol or polyethylene glycol. When administered in liquid form, the pharmaceutical composition contains from about 0.5 to 90% by weight of protein of the present invention, and preferably from about 1 to 50% protein of the present invention.

[0143] When a therapeutically effective amount of protein of the present invention is administered by intravenous, cutaneous or subcutaneous injection, protein of the present invention will be in the form of a pyrogen-free, parenterally acceptable aqueous solution. The preparation of such parenterally acceptable protein solutions, having due regard to pH, isotonicity, stability, and the like, is within the skill in the art. A preferred pharmaceutical composition for intravenous, cutaneous, or subcutaneous injection should contain, in addition to protein of the present invention, an isotonic vehicle such as Sodium Chloride Injection, Ringer's Injection, Dextrose Injection, Dextrose and Sodium Chloride Injection, Lactated Ringer's Injection, or other vehicle as known in the art. The pharmaceutical composition of the present invention may also contain stabilizers, preservatives, buffers, antioxidants, or other additives known to those of skill in the art.

[0144] The amount of protein of the present invention in the pharmaceutical composition of the present invention will depend upon the nature and severity of the condition being treated, and on the nature of prior treatments which the patient has undergone. Ultimately, the attending physician will decide the amount of protein of the present invention with which to treat each individual patient. Initially, the attending physician will administer low doses of protein of the present invention and observe the patient's response. Larger doses of protein of the present invention may be administered until the optimal therapeutic effect is obtained for the patient, and at that point the dosage is not increased further. It is contemplated that the various pharmaceutical compositions used to practice the method of the present invention should contain about 0.01 μg to about 100 mg (preferably about 0.1 ng to about 10 mg, more preferably about 0.1 μg to about 1 mg) of protein of the present invention per kg body weight.

[0145] The duration of intravenous therapy using the pharmaceutical composition of the present invention will vary, depending on the severity of the disease being treated and the condition and potential idiosyncratic response of each individual patient. It is contemplated that the duration of each application of the protein of the present invention will be in the range of 12 to 24 hours of continuous intravenous administration. Ultimately the attending physician will decide on the appropriate duration of intravenous therapy using the pharmaceutical composition of the present invention.

[0146] Protein of the invention may also be used to immunize animals to obtain polyclonal and monoclonal antibodies which specifically react with the protein. Such antibodies may be obtained using either the entire protein or fragments thereof as an immunogen. The peptide immunogens additionally may contain a cysteine residue at the carboxyl terminus, and are conjugated to a hapten such as keyhole limpet hemocyanin (KLH). Methods for synthesizing such peptides are known in the art, for example, as in R. P. Merrifield, J. Amer.Chem.Soc. 85, 2149-2154 (1963); J. L. Krstenansky, et al., FEBS Lett. 211, 10 (1987). Monoclonal antibodies binding to the protein of the invention may be useful diagnostic agents for the immunodetection of the protein. Neutralizing monoclonal antibodies binding to the protein may also be useful therapeutics for both conditions associated with the protein and also in the treatment of some forms of cancer where abnormal expression of the protein is involved. In the case of cancerous cells or leukemic cells, neutralizing monoclonal antibodies against the protein may be useful in detecting and preventing the metastatic spread of the cancerous cells, which may be mediated by the protein.

[0147] For compositions of the present invention which are useful for bone, cartilage, tendon or ligament regeneration, the therapeutic method includes administering the composition topically, systematically, or locally as an implant or device. When administered, the therapeutic composition for use in this invention is, of course, in a pyrogen-free, physiologically acceptable form. Further, the composition may desirably be encapsulated or injected in a viscous form for delivery to the site of bone, cartilage or tissue damage. Topical administration may be suitable for wound healing and tissue repair. Therapeutically useful agents other than a protein of the invention which may also optionally be included in the composition as described above, may alternatively or additionally, be administered simultaneously or sequentially with the composition in the methods of the invention. Preferably for bone and/or cartilage formation, the composition would include a matrix capable of delivering the protein-containing composition to the site of bone and/or cartilage damage, providing a structure for the developing bone and cartilage and optimally capable of being resorbed into the body. Such matrices may be formed of materials presently in use for other implanted medical applications.

[0148] The choice of matrix material is based on biocompatibility, biodegradability, mechanical properties, cosmetic appearance and interface properties. The particular application of the compositions will define the appropriate formulation. Potential matrices for the compositions may be biodegradable and chemically defined calcium sulfate, tricalciumphosphate, hydroxyapatite, polylactic acid, polyglycolic acid and polyanhydrides. Other potential materials are biodegradable and biologically well-defined, such as bone or dermal collagen. Further matrices are comprised of pure proteins or extracellular matrix components. Other potential matrices are nonbiodegradable and chemically defined, such as sintered hydroxapatite, bioglass, aluminates, or other ceramics. Matrices may be comprised of combinations of any of the above mentioned types of material, such as polylactic acid and hydroxyapatite or collagen and tricalciumphosphate. The bioceramics may be altered in composition, such as in calcium-aluminate-phosphate and processing to alter pore size, particle size, particle shape, and biodegradability.

[0149] Presently preferred is a 50:50 (mole weight) copolymer of lactic acid and glycolic acid in the form of porous particles having diameters ranging from 150 to 800 microns. In some applications, it will be useful to utilize a sequestering agent, such as carboxymethyl cellulose or autologous blood clot, to prevent the protein compositions from disassociating from the matrix.

[0150] A preferred family of sequestering agents is cellulosic materials such as alkylcelluloses (including hydroxyalkylcelluloses), including methylcellulose, ethylcellulose, hydroxyethylcellulose, hydroxypropylcellulose, hydroxypropylmethylcellulose, and carboxymethylcellulose, the most preferred being cationic salts of carboxymethylcellulose (CMC). Other preferred sequestering agents include hyaluronic acid, sodium alginate, poly(ethylene glycol), polyoxyethylene oxide, carboxyvinyl polymer and poly(vinyl alcohol). The amount of sequestering agent useful herein is 0.5-20 wt %, preferably 1-10 wt % based on total formulation weight, which represents the amount necessary to prevent desorbtion of the protein from the polymer matrix and to provide appropriate handling of the composition, yet not so much that the progenitor cells are prevented from infiltrating the matrix, thereby providing the protein the opportunity to assist the osteogenic activity of the progenitor cells.

[0151] In further compositions, proteins of the invention may be combined with other agents beneficial to the treatment of the bone and/or cartilage defect, wound, or tissue in question. These agents include various growth factors such as epidermal growth factor (EGF), platelet derived growth factor (PDGF), transforming growth factors (TGF-α and TGF-β), and insulin-like growth factor (IGF).

[0152] The therapeutic compositions are also presently valuable for veterinary applications. Particularly domestic animals and thoroughbred horses, in addition to humans, are desired patients for such treatment with proteins of the present invention.

[0153] The dosage regimen of a protein-containing pharmaceutical composition to be used in tissue regeneration will be determined by the attending physician considering various factors which modify the action of the proteins, e.g., amount of tissue weight desired to be formed, the site of damage, the condition of the damaged tissue, the size of a wound, type of damaged tissue (e.g., bone), the patient's age, sex, and diet, the severity of any infection, time of administration and other clinical factors. The dosage may vary with the type of matrix used in the reconstitution and with inclusion of other proteins in the pharmaceutical composition. For example, the addition of other known growth factors, such as IGF I (insulin like growth factor I), to the final composition, may also effect the dosage. Progress can be monitored by periodic assessment of tissue/bone growth and/or repair, for example, X-rays, histomorphometric determinations and tetracycline labeling.

[0154] Polynucleotides of the present invention can also be used for gene therapy. Such polynucleotides can be introduced either in vivo or ex vivo into cells for expression in a mammalian subject. Polynucleotides of the invention may also be administered by other known methods for introduction of nucleic acid into a cell or organism (including, without limitation, in the form of viral vectors or naked DNA).

[0155] Cells may also be cultured ex vivo in the presence of proteins of the present invention in order to proliferate or to produce a desired effect on or activity in such cells. Treated cells can then be introduced in vivo for therapeutic purposes.

[0156] Patent and literature references cited herein are incorporated by reference as if fully set forth.

The application's sequence listing, which the Patent Office published only in electronic form, follows.

SEQUENCE LISTING (631 sequences)

SEQ ID NO: 1 - DNA, 1930 bp, Homo sapiens
gataaaggtgaatgtggagccaaggactctggaagtaaggtcagttgctgcaggttttatgtgaaaaaacaaaatcaaacacaaacagcaaaatcaaaccacaagtgtgttagtgggaatgacccatcttaaatagaatgtaaatgcaaatatgcatgagatgcataatttggtaagatgttttggtaatgcctgcagagttactgatttgttgtttttattttattttaaatatagtatatgcatttaatatatttatttcagtctgtgttcatgtctaactcatacataatagtgcatgaaacagcaacatactgaaatagagtaaatggcctaatgagaacattaatgaaacacttaagattaagtgattatagggatgtgtgttttccttgtctgttttgatggcacagttgcagcatctatagtatcactgattggcaagactattcgtgtgcatcatgtgtgctctgtttgtattgaatggcaaagctttgttgtgagatgtagtctagtggatgagagtacactgaggggatgaattttggagaccaagagatcaaaaatggtacactgcaattctaaacatgtccaaagcctacttggagagtgagaatgtactggaaccttcaccagccaacatattgcaggataacttcctgaaggtttatcttagccatcttagtactttgagggattggaaatgtggtcagtcctccatttatgactctactaagccagtaacatggtcaacatttaaaacttgcttctacaatcacacgtatggtttattttagccctgttcgctgtcagctttaccagattatttataggatgaagaaactgtcttgtaccttcaatttttcccacggtaatggaatataactatttatcaatttatcactgcaactgacatagccagggaaatgtttaagaaatgaataaatagaagtttattccctgcaggtagtcgattgagtccaccaaaatcttaagctaaattttatgttgtttcatggtagctgttatgaaaatggaccatctaagagaaaatccattgtttctcaaattcaaatgcattctgtgtgactaggttgttcccgtgataatgctatgtgacattgctgttctcttctattcaccagtttgccttcctaataacctcttctcatatacattctttaggaaaagaccagtgccctcagtctgagcaacgttgctggagtattctacatccttgtcgggggccttggtttggcaatgctggtggctttgattgagttctgttacaagtcaagggccgaggcgaaacgaatgaaggtggcaaagaatgcacagaatattaacccatcttcctcgcagaattcacagaattttgcaacttataaggaaggttacaacgtatatggcatcgaaagtgttaaaatttaggggatgaccttgaatgatgccatgaggaacaaggcaaggctgtcaattacaggaagtactggagaaaatggacgtgttatgactccagaatttcccaaagcagtgcatgctgtcccttacgtgagtcctggcatgggaatgaatgtcagtgtgactgatctctcgtgattgataagaaccttttgagtgccttacacaatggttttcttgtgtgtttattgtcaaagtggtgagaggcatccagtatcttgaagacttttctttcagccaagaattcttaaatatgtggagttcatcttgaattgtaaggaatgattaattaaaacacaacatctttttctactcgagttacagacaaagcgtggtggacatgcacagctaacatggaagtactataatttacctgaagtctttgtacagacaacaaacctgtttctgcagccactattgttagtctcttgattcataatgacttaagcacacttgacatcaactgcat

SEQ ID NO: 2 - DNA, 2106 bp, Homo sapiens
accttgtgtgattcatgcagctgtactcaaggtaaaggaagaagaaagtctcgaaaacatttcttcagttaagaagatcataaagcagataatatcccattccagtaaagttttgcacttccccaatccagaagacaagaaattggaagaaatcattcaccagattactaatgtggaagctctcattgccagagctcggtcactaaaagccaagtttggaactgagaaatgtgaacaggaggaggaaaaggaagatcttgaaaggtttgtgagttgcctgctggagcagcctgaagtgttagtcaccggtgcaggaagaggacatgctggcaggatcattcacaagctgtttgtgaatgcccagagggctgcagctatgactccaccagaggaggaattgaagagaatgggctccccagaggaaagaaggcagaactccgtgtcagacttcccaccccctgctggccgggaattcattttgcgcaccactgtgccgcgccctgctccctactccaaagctctgcctcagcggatgtacagtgttctcaccaaagaggactttagacttgcaggtgccttttcatcagatacttccttcttctgattcttctagcattactcgttggtggcttcagagacagtgctgcctcctcctgagggagggaaggtaccagggagaacctgggaggtcctggagagggccctgtccagttgggtgatcaggaatcaaaccagcatcggaaagacttcccagcaccaagcttgagctgtgtcgtttcgtggagggggcagcgaggatgggcttgagctgttgagagatttctgccctagagatggcctttgtatatgggggggtggtggggggacacaaacacatcagacactccgtcctcacactggcaggacggtgttcatcgcattctcttctgtgaccagcctctagctagcggctgcattcgtggtctgtgcaaacacttcgtggtctatatatcagcagcaagtgtgcaaaataaaggacctgttaactcagatttctggatattttggtggagcttctagtcccagaatctgtgtttttaaaatactacatgacattctgtctattcaatcacctggtggtcatctttcttgactaattaactgttgatgagcattttggatattctaggagaaagcctataatttcacatagtttctctttttcatgtaactgtacctaaatgtattacttctgataaaactatatatcaaatgtcactgcaaattagttttatatctgtcatgtgagatttgtcttacttatttttcttttggttgccatggaagttatggccctgaaaatcgtctccctccccttctcttgctgtacagcatgcgttctctttttgtggttgctggctgggtactgtatttaatgaagtagagaatagcacttgcaaaaatacagtcttggtacctagagactgtcatgcagatagtataatttggtatatgtgctaatgcattgagtagaggattattttaacacactattttgcttttgtattttagttaaaataatcgatggggatgtgtagcccccccgtgtgaggatgacatcaccacatttctagtttcatggagctcaagatgtcttgtgtctgtgtggctagatggcctctgcttggtaatcttatttttaggcctaaaattcccacttaaatccaaagtaaaaatggttatactgaagcataaaccttgcctgtgtaattttaaaaaattaatagagctgtgcaaaccctgttatttttgtaaaaaaaaaaaaaaatacatatctatatataatatgtgtgtgtgtgtgacatatgcacacgtctctgtgtatgtgaagtaggggaggccctgggggatgacctcccagcctttatgatgcttttctctatgctgctggacttcattcttactggtccacgcagatgcaggcggcctgaggccagtgctgtaccaagtagaagacggttcctaaggacagagtttgtctgttttctaacaaagaaaaattctacaaaggagaggttgggcgttacaaaggcattgtgaatctaataaaaggaaagtgtcgctttc

SEQ ID NO: 3 - DNA, 2101 bp, Homo sapiens
tttgtcgtttctatgcctatttaaagtctcctaaaggtgtaattgactaggaaggatgtagttctacactgcactccaccctgggcaacaagagcgaaaactgtctcaaaaaaaaaaaatttttcatttgaggtattcttccagtagaaggttagtaagtttttaatgaaaccattaaaaataacacttcccagaaaatagatgacatcagtgccccttgctactttctcagtcctcactattgctttgagggcccaggtactgaaactggttgtcttgagttttgtgtcagctttttctccagtccattatccccctcccttgcttctgaagcagtctaggttaaactagccaggcaggtagttgtggactggtgattttcaaaagccccactttagagatcaggccacagctttttatatcgcacaggacacatcagcctgagctgctgcctcatgcctgtttccccaggaacctcactcctttggtagaaccttgggattttagaaattgtggcttttccataactcatttactccaacagttgaagttacacacattgctcccaaatttggaaatagaccacagtaccttacctttcattccccatctggcctttaccttctttgcttcagtggttgaaaacagttgccatattcaaagtatagtagatttcaacctcacacaaatgacaagtcccattttacaatcctaggaaggcccaccaatttcatttcacgcgccagggcggctgcagttggaggccgagggcagccctctgctcactgaatgtcttgcatgtgctgactgctgcccgcagtgctgaacatgccccaccgcccaggcccagcactgcttgttgggtcagcatctagtgctgctgtcacatctttgtctgcacagccagtaggattgcctcagccagggggtttatcagaaggtgtgcaaggcctttgggggaactgagcccctatagtgggcagtctcctttaccttcccacctccctgaaaagcacagaagacagtgccttggtttgtgttttgaagcaaacaagtcagctttctggctttgccccaaaactgtgatggaacataataaaactggagatacggtttttaacactgcaaaaaggaaaaagcatcaagtttctacttctggctggaaagcaaaaccaatctcagctgacaaggctgggcaaactaagttttcctgagcccattttcctttgagccctgacctagcctggccttacctcattaaggtttggttaaagcagtggaaaggaggaggaggcaggggtggatgggggtgtggggaggggatgagcactctgcagccgattaatctgttggtaggggcccagcttcttgggagtgcttattcagcccaggagtggaggctgtttacagcgagccctggagatggcagcttgtctccagctggggaggggtcaggcccctaaattgaagaccactttggtagcagaactgtagggactggtgagtcaactcacagattctgcagcagctgctccacccacaataaagcaaacgccgacaggctagaccccagattgcaggggctgccacctacaaggtgggaccacaggctgcctcaccgggattgtctgccactaaatagctggagtcacagattgagataaatgccaccttcaaggttgcagtgaaaagcataatcctatgtgatgaatttatatgtgttattttttaaaaaagctattttattactgcatgttcccgtcccgtcttgtgaatgtgagtccccgccaccacgtgaggtgcagtcgttgcagcggctggtgcaggagtgcagctggcgcgtgtgtgatagcatctcgtaggtgttgctgcacaagagttaaccagagtcaatgccaaacacatagtatgagaagtgtactttttaagaaattaatttatttgagttcaaatatttttgaaatataaaaattggttgtattttttaaagctataattcttgtagacattctgtggttaaaaatttgattgtgcttattaaaaatggtcatctatgttttgcacttcagctacgtgaaaataaaatttctttgggaaggcg

SEQ ID NO: 4 - DNA, 1861 bp, Homo sapiens
agccaccctccggaagcacagccgcgtgcaccagtcggagcatcctgagaagtgctcggaatgcagctactcctgctccagcaaggccgccctgcgcatccacgagcgtatccactgcaccgaccgccctttcaagtgcaactactgcagcttcgacaccaaacagcccagcaacctgagcaagcacatgaagaagttccatggggacatggttaagactgaggctctagagaggaaggacaccggcaggcagagcagccggcaggtggccaagctggatgccaagaagagtttccactgcgatatatgcgatgcctccttcatgcgggaggactcgctccgcagccacaagagacagcacagtgagtacagtgagagtaagaactcggacgtgaccgttctccagtttcagatcgaccccagcaagcagcccgccacgcccctcactgtgggacacctccaggtgcccctccagcccagccaagtgccccagttcagcgagggaagagtcaaaatcatcgttgggcatcaggtgccccaggcgaacaccatcgtccaggctgccgccgctgcagtgaacatcgtcccgcctgccttggtggcccagaacccagaggaactcccagggaacagccggctgcagatcctgcgccaggtcagtctgatcgccccccctcagtcctcgcggtgtccgagcgaggcgggcgcaatgacccagccggctgtcctgctgagcacccacgagcagacggacggagccactctgcaccagactctcatccccacggcctcaggtggcccccaggaaggctctggcaatcaaactttcattaccagttcgggtattacttgcactgactttgaaggcctaaacgccttgattcaggaggggacagcagaagtgacagtggtgagcgatggaggccagaacatcgcagtggccaccacagcgccaccggtcttctcctcctcttcccagcaagaactacccaagcagacctactccatcattcaaggggcagcccatccagctttgctctgtcccgccgactccattccagattagtgcttaaaaaaacaaaaggagtgggggaaaggaattgagaaaaagaaatcttaagtagaattctctaaaaggtttgctcttaatgttttctttgttttgttttgtttttgagacggagtctcgctctgtttcccaggctggagtgcagtggcgctatcttggctcactgcaacgtccgcctcccaggttcaagcgattctcatgcctcagccctccgagtagctgggaccacaggtgtacgacatcatgactggctaatttttgtatatttagtagagacggggtttcatcatgttgaactcctgacctcaagtgatctgcccacctcagcctcccaaagtgctgggattacaggtgtgagccaccatgcctggccgtggtttgctcttaatgtttttaaggatggttgtgaatccccctggccccataataaattgtaattttatactgcttactataatttttttaacactgtaacaactttgagaccacctctgaatcgtcgcattataactgttgtagaatcttaaatgggaccaagatgattccaatgaggggttggaattaaatgcattaagtagtgaattcatgtgtttgtttccaacttgattttccaactctaataaaggtttctgtccatcttattacatttgtgtagtaaatggtactccccagcctctcttttgccccattctggaatactccccagagtttgggggtgttcatgttttatacatgtaagtctgttggcatgaaggaccattttctacataatatgacatggatacttgaccc

SEQ ID NO: 5 - DNA, 1506 bp, Homo sapiens
  misc_feature 937: n=a,c,g, or t
ggtttgtggaagatgccatcttaggagtcttcgtggaagctggagcctgttgcttagccgtcaacatagaggctgaaaatgccagatgcttctcagcctcctttagctgcagggtttagtcatgtgatctgggctgggcccatcaggtgccatggactgaggagcctggaccaagccagagcccaacacagaaccttttctggtggaagtggccatggctactgcagccttgtctagattccagggcaacagcagcagggtcatggttcagaccccagccatggttgtggcacagctgcccagggctctgagaacagagcaggactctctggatagcttgtgcaccacagttctggccatgctcctggctgctgtctggcaccgtttgttctcattcatgccctgaacctggctcttcagccttcccagagactctgtgggctgcccagcatccttcccaaaaatccctcttctgttttaaattatccagagccagtttctgttgcatttttaagtcagagttctgaccaattcacagtcttatttcagtctccgcatccaacttatttttgtattttgctttggtacacacggttctgagaaaattctaatcatacagatggatggttataaataataatgataacaactattactggctgggcacggtgcctcctgcctgtcatcccaacactttgggaggctagggcaggaggatcacttgaacccaggagttcaagaccagcctgtgcaacatagtgagaccccatccctacaaaaaaaatttaaaaaatagccatgcatggtggtgcgggtctgtagttccagctacttgggagactgaggtgggaggattgcttgagcccaggaagttgagactgtagtgagccatgatcgcaccactgcactctaacctgagtgacaaagcgagacacancaatgacagccacaaaaaaactattacatagcactcactatatgccaggccctgtcttaaccactttgcatttattaattcacttaacaaaccttttgaagggagtctatcattaacatccccctttcgtaaatgagaaaactgaaggacagaggagtgatttgtccaaggtcaaggacttaaatctaggcagtcccaatccaggatttgtgctcttaactcctgctaaaggattttttttcagattatcttttgagattagaatgtcttcgattaaaccaatctagaggccgggcgcagtggctcatgcctgtggtcccagcactttgggaggccgaggcgggcggatcacaaggtcgggagttcgagaccagcctggccaacatggtgaaaccccgtctctactaaaaatacaaaaaaatcagccaggtgtggtcgcgcatgcctgtggtcccagctacttgggagactgaggcaggagaatcgcttgaacccaggaggcggaggttgcagtgagccgagaccgcgccactgcactccagtctggcaacagagtgagactccgtctc

SEQ ID NO: 6 - DNA, 2572 bp, Homo sapiens
gacagaagtggcggttgctgacgcctggaaattcccctgaaggtggagcaccacccaacccccctgggtcccaccctccctcaaggcctcctccacctccacctccaccccgcctggcctggcgtccacctctgcggctcctacctgggtgcaatcgagttaaatggctgataagcagatcagcctgccagccaagctcatcaatggcggcatcgccgggctgatcggtgtcacctgcgtgtttcccatcgacctggccaagaccaggctgcagaaccagcagaacggccagcgcgtgtacacgagcatgtccgactgcctcatcaagaccgtccgctccgagggctacttcggcatgtaccggggagctgctgtgaacttgaccctcgtcacccccgagaaggccatcaagctggcagccaacgacttcttccgacatcagctctctaaggacgggcagaagctgaccctgcttaaagagatgctggcgggctgtggggctggcacctgccaggtgatcgtgaccacgcccatggagatgctgaagatccagctgcaggatgcagggcgcattgccgcccagaggaagatcctggctgcccagggccagctctcggcccaggggggtgcccagccctcagtggaggctccagctgcccctcggcccacggccacccagctgacccgcgacctgctgcggagccgtggcattgccggtctctacaagggactcggggccacgctgctcagggatgtccccttctctgtggtgtacttgccgctctttgccaacctgaaccagctgggccgcccggcgtccgaggagaagtcgcctttctacgtgtccttcctggccggctgtgtggctgggagtgccgccgctgtggccgtcaacccctgtgatgtggtgaagacgcggctccagtcacttcagcgaggcgtcaacgaggacacctactctgggatcctggactgtgccaggaagatcctgcggcacgagggcccctcggccttcctgaagggcgcctactgccgcgcgctggtcatcgcgccccttttcggcatcgcacaggtggtctacttcctgggcatcgcggagtccctgctggggctgctgcaggacccccaggcctgagcccagcacccgctccaccccagccagctgggcagggccggtgtggggctggagccaggcagctagcccaggacggagcaagggaagacccctccccagccctcccgtcggcaggggcagcagggggcagggtgcagggtccacataggtggtgcacacgcaagccccccggggtgctgcctgcaccgttgggatcaatgtctcatttatgtagaaaatgcagaaatctttacattcctcaagctagcccctgccccaatcctgccctggcctgaacacccccagggacagagctggtctctgggctgggggcccccgggcctgggccgggcaggctggaccatacccccagtccaccagctccagtctccacagccatcctggcccacacaggcaccccacacaaacctatttattgaatctgctggacccaagcggctctccagcccttctgtccttccccagccgctcttgtcgccttggcaggacttgactctgcctccctggcaagccttgcaagaggactggggtctcctgccctctctgttgagccaggaatcccaagtgaggggttgccctgaggtctgactcttggggcaagcccgccacccactgtgggactttctggtgggctcctcagctcccaccccaggctggggcccagattgtgaggtctgtgtgcatgtgtgtgtgtatgtgtgtgtgcatgcgtgtgtgtgttgtggggatctggcctggcccttggggatggggctgctggggactgccccccttcccgccgtggccaggcgctctgtgtgctgtgtgtgccccaggctctgttgaccccgtccaggaactaacttacccagcttggtctctcctgagtcctccaccctggcctgggattggccagggagcagggcgggcattgggaccagtgtggagcctgagggtgcctgccctgctctggagggagggccaggagctgccacacccccaagtcctctcagggcccaccctcctttttcagcctctgcataaggcccctgggtacactgcagaagccccatccttcccgcctccgggcataaggcccctgaccacacttcagaagccccatcccccctgccaccgggcgatccctgctgtgagccgaagctctccctgccccgccctggccatgtgatcgtgttggtgacagaccctgatgtgctggtgctgtgtccccaaaaccggggccctccacagaggccccttcccagcgacactacctggggctcaggcctggacccccccagttcacggttgctcctgggagctgcccctcccgtcacatcagaaccttggaagctgctgctgctgcttacagaattatatttttttcttttgaagagttttaagaagttgtaactttttgtgtcttgtcatgtcagagaataaataaatattctaagt

SEQ ID NO: 7 - DNA, 1704 bp, Homo sapiens
ctgtgcctgagcctgagcctgagcctgagcccgagccgggagccggtcgcgggggctccgggctgtgggaccgctgggcccccagcgatggcgaccctgtggggaggccttcttcggcttggctccttgctcagcctgtcgtgcctggcgctttccgtgctgctgctggcgcagctgtcagacgccgccaagaatttcgaggatgtcagatgtaaatgtatctgccctccctataaagaaaattctgggcatatttataataagaacatatctcagaaagattgtgattgccttcatgttgtggagcccatgcctgtgcgggggcctgatgtagaagcatactgtctacgctgtgaatgcaaatatgaagaaagaagctctgtcacaatcaaggttaccattataatttatctctccattttgggccttctacttctgtacatggtatatcttactctggttgagcccatactgaagaggcgcctctttggacatgcacagttgatacagagtgaagatgatattgggggatcaccagccttttgcaaatgcacacgatgtgctagcccgctcccgcagtcgagccaacgtgctgaacaaggtagaatatgcacagcagcgctggaagcttcaagtccaagagcagcgaaagtctgtctttgaccggcatgttgtcctcagctaattgggaattgaattcaaggtgactagaaagaaacaggcagacaactggaaagaactgactgggttttgctgggtttcattttaataccttgttgatttcaccaactgttgctggaagattcaaaactggaagcaaaaacttgcttgatttttttttcttgttaacgtaataatagagacatttttaaaagcacacagctcaaagtcagccaataagtcttttcctatttgtgacttttactaataaaaataaatctgcctgtaaattatcttgaagtcctttacctggaacaagcactctctttttcaccacatagttttaacttgactttcaagataattttcagggtttttgttgttgttgttttttgtttgtttgttttggtgggagaggggagggatgcctgggaagtggttaacaacttttttcaagtcactttactaaacaaacttttgtaaatagaccttaccttctattttcgagtttcatttatattttgcagtgtagccagcctcatcaaagagctgacttactcatttgacttttgcactgactgtattatctgggtatctgctgtgtctgcacttcatggtaaacgggatctaaaatgcctggtggcttttcacaaaaagcagattttcttcatgtactgtgatgtctgatgcaatgcatcctagaacaaactggccatttgctagtttactctaaagactaaacatagtcttggtgtgtgtggtcttactcatcttctagtacctttaaggacaaatcctaaggacttggacacttgcaataaagaaattttattttaaacccaagcctccctggattgataatatatacacatttgtcagcatttccggtcgtggtgagaggcagctgtttgagctccaatgtgtgcagctttgaactagggctggggttgtgggtgcctcttctgaaaggtctaaccattattggataactggcttttttcttcctctttggaatgtaacaataaaaataatttttgaaacacc

SEQ ID NO: 8 - DNA, 2144 bp, Homo sapiens
ggatttgggcaggcaccgtggatccccgggaaggggacgagttgacagatgtgcgtgaggaggtctctggtcggcctcaccttttgtacctgctacctggcttcttacctcacgaacaagtatgtgctgtctgtcttgaaatttacctaccctacattattccaagggtggcagacgctcattggtggacttttgcttcatgtgtcctggaaactgggctgggtagagatcaacagcagttcaagatctcatgttcttgtgtggcttcctgcttcagtgctgtttgtgggtataatctatgctgggtccagagcattgtccagactgaaaacatctcctgcaaagatctgtagtgccctcctcctcctggccgcagcaggatgccttcccttcaatgactcccaggggcttataaaattctacagaagtcccagaaacccagtgcattaagtgacattgaccagcaatacttaaactatatattcagtgtggtgctcctggcatttgcatctcatcccacaggtgatctcttcagcgtcctggacttcccattcctgtacttctacagattccatggtagctgctgtgccagtggatttttgggattctttctcatgttcagtacagtgaagctaaaaaaccttctggccccagggcagtgtgcagcctggattttctttgctaagtcctggaagacaatcatggataggctccttatttccttcctggaggctgtgcaggtgtccagagctcaagtgacttacacaaggggactcagtcgatccaagataatcacagctggcttatcaatattgctgtttgatgcgatcctgaccagtgcaaccacgggatgcctcctgctcggtgcgcttggagaggccttgctggttttctcagagcggaagagctcctgaacaagacggtcaagagaaagactcacaggctgctgcgggagaacagcttgtacacctgtgtacgagcccctggtctcatagctccctgttggatgtgtcagaaagaggaatgcaaggacagtgaggccaggtgggcagtgccatcaccctcacccaagtgaatgtggtggtggctgatgaggccgaggccctggtgcttcaaggagcaccctttctgggggtctgcaggtcactgcagaggagcggtctgttacatcttcccatttggagaacctctctcaaccgtgctgtagctggttctgcagaaacaggaagtacaggatttcatgggctggctctgctcgcctcgactgagcttcacacctctggatgccacatgctctctcccaaacactgctttcagtgcaaggtagtgggcctaaggggtttggttgtcttttttttttttcatttttaaaattttaaatttttatttattattattttttagagacaaggcctcactctatcgcctaggctgaagcacagtggtgcgatcacagctcgctacagccttgacctcctaggatcaagccatcctcctgcctcagcatccacagtagctgatgtgcaccaccagacccgtctcattttttctatttttattattttagagatggggatctcactgtgttggccaggctggtctcaaactcctgggctcaagcaatcctcccaccttggcctcaaagtattgagattacaggcatgagccactgcacccggcctttctcatttttatttttaaattgacagacgtaacagtgcgcatttatcacgcacaacacaatgctttgggaatggttaaatctagctcacaaatgcattacctcacacggttgtcatttttgtggtgaggcttggttgtatgttttgtttcattcatgtttttacatccttggagtctcctctgggtccgtcctttctttgctgtcatgctggcttgcctaaggcccaccgccacctgcgtacgagcattttaaactctagagtgagtgacagcctttttatggttggtgttactatttatttcctgcctctaaacttctcgtggtccttataaacttgtcaggatgtgtgttgcgttgaattctgcatgtcctttttttgcccaccctcaggttaagctggtactaacttatccccagaggaaacagggtttatgagcactgacagatgtcttccctgggc

SEQ ID NO: 9 - DNA, 1180 bp, Homo sapiens
caggcatgccttagggttgcgcttctctcccatccaattccagctcctactcaattctaaacctgaccttaagagtgggaccaggtgtacagggggtgcagagtgtgggtgttcccagggccatgggtgccctagcactgggaggatgtgagcaagtagcaaaggtctgggcacatctgagttagcagccagggctgctacctgggaggactctaaactctcccagcagagagcttgtcgggctgtgctgtgatctgctacttctaagcacttatatgaggcaggggcaccctttcctatttgcacatgggtgagtagcacttagttccaagtacttctgaccttgcagctcctgctctggcaagaccccctcctacctctctccatcatgggttcctcactattgcctccctgcctgtggccctctctcttctttttgttcttcgaacccttgaccctttctctttcagacttggtcaggtactttcagggcctgggccccccaccgaagttccaggtaacactgaatttctgggaagagagccatggctccagccatactccacagaatcttatcacagtgaaggtgagctcggagcaggggtagagtacccatctaatgagagcagagacagtggtgctccaggaggcaaagggggtctcccagtggggaaggagctcctgggggtggtgtctgtccctgatgcacgcactgagatgctcttctccatctcttccaatacagatggagcaggcctttgcccgatacttgctggagcagactccagagcagcaggcagccattctgtccctggtgtagagcctgggggacccatcttccacctcacctctttgttcttcctgtctcctttgaagtagactcattcttcacacgattgacctgtcctctttgtgataattctcagtagttgtccgtgataatcgtgtcctgaaaatcctcgcacacactggctggtggagaactcaaggctaattttttatcctttttttttttttaattttgagatatacgccctctttcatctgtaagggactaggaaattccaaatggtgtgaacccagggggcctttccctcttccctgacctcccaactctaaagccaagcactttatattttcctcttagatattcactaaggacttaaaataaaattttatt

SEQ ID NO: 10 - DNA, 1745 bp, Homo sapiens
tcaccgtgttgcccgggctggtcttgaactcctgagtgcaggcgatctgcccacctcaccctcccaaagtgctaggattacaggtatttggttttttgtttggttttcaagcaacctttctaaattttgctatgctcactctttcttcacatgttggtactggctagatacagattttgctttcctattggagactcttttgagagctggctatcccctcttgctccttttcttttttctcttccctactttcaagtttcttgctctttttcttaccccataagttaccagaaattcatacccccttgagagggctttttgtttgaacttcagtctttagtttcatcaacttttctaaggaaattgatctgttaatgaaagttggcttgcttgacttcagaatatctgtattattcagagatgtgtttttctggttgctttgtttgagcacagtgtaaatatcacccattgcatagctttggcagtgacataaatctggcagcgtagatcgagaaaagctagaagtctcaccacagattgtatttcagtgaaagggattctttttaagtgctgataaaactaaagaaaacctataaacatggaaaacaattattaaacccaccatatgctcatactgctattaaatggtgtgacagattctagaaagagttaccttttggtaagagcactgcttgttaactatagttgattgctttagatgtctagtgtgtatacaaaagcatgaattttattccttataaccaaagtagaaacctactctgagcaatttgacaaaaggtttacattatttattttagtgtagtttaagattacagtaagatacaattcccaaagagtgaaatataaggctgggcgtggtggatcacgcctgtaatcctgacactttgggaggctgaggcgggtggatcgcctgaggtcaggagttcgagaccagcctggccaacatgacaaaaccccgatctactaaaaatacaacaattagccagacgtggtggtgcgcacctgtaatcccaactactagggaggctgaggcaggagaatcacttgaacctggtggggcggaggctggagtgagctgagatcatgccattgcactccagcctgggcacactctcaaaaaaaaaaaaaagtgcaacatagcttttcacaaaatatggaactgtggtagtgtagaacaatgtctcaatatacctcctacactaagtataatagtaaatatctgtatttggtggcataatatgttcttagtataaaccaaaaacacatgctgagcattggacattgtccaatgtttaattcatatgattcattctgagtttctgactgagatcattctttcagactatgtctatttgtcctgggacccataaaatatgcagccctaacatgatttcatttttgtttcctttcctggaaaaggagaaatcattcagatcagctttcatattgccttatagacgatgacttcaaaatagtttgaaagggactcctttgttctagaactgctctaacacagtagccactagccacatgtggctattgaaagattgaaatgtggttattccaaatcaggatgtacagtaaatataaaatacacaccagatttcaaaggcttacatgaaaaaagtaatgtgaaatatctcactagtagtttttatagtgattacatgttgaaattttaacattgtgaacatattagtttaaataaaatgtattgtgaaaat

SEQ ID NO: 11 - DNA, 2157 bp, Homo sapiens
gaatttttggtgacatggttttggggagcaggtcactgctatggccttacctttggacctgccttcaaagtgtgccttcagccttttaacaggtcacttggtcacagacattgcccttggatctggagaaaaacttcatgatgcagaaatgtgctattgcctggctggggagggcagacatcatgtccagtgcttttccagactgtaggaagctgagccatcctgctcaagctctgtgtggtggaagcagaatgtatagggcttgaaacataggctgtgatttactatcccagacctcccactccaaagctatggctgttgcctgggcagagctgggggagtgagcagggctctggcctgatatcaccccatctggctgtgcacttggatttccttggctttaggctaagcccatgctgtgcctcttgtactcatcctcttgtcgggcacatcagccttgtgtgtcctcagcgtcacagcccagatacagcttcccttaaatgtaagctaaatgtcctggctcccagcctcatcaagggccacattgttcttttcatggggaaagatggaaaatatgatctgaacctgacatttggcccatgattctggtggaatcattccaggaagatttcattcttagcatgtggtggaaaaaatctgtggagattcctagaataagtcagtactttgaagtccctattcaggccaagaaggcctgggaggtggtgagagcttgtggtctgtctgtacccagtgatggctgaggggtgggcatgtggtttgctgttcatttcaaaataacagttagctggactggaatctgaacccattcccacctctgaaaaaaagataatatgtgggtgtaacatagcccagtttgggaaattgggtctcttgaatgatagttaggatgttttatccttgtgagttcatatgccttgtcttcccagcaaagaaaatacagtgcttttaaaaaacataactttcagtctatgtgtttttagcactctttttctaattcatctatattcactcattcagctcatttttgtgagtacccactatgcatcagacctagcattaggtgctgagggcatagggatggagaagacataggtctgcacccgtgagctcccagcttgtgtcatcaggcagttacaatatgatgcggtcactgccttgaggtctgcatccctggtgcatgggttacccggccactgagagatcagtacagcaggacagaaaggattcccagaggaagtcagtctaagcagagtcctgaaagatctgtagctgcagaagccagggaaaggcattccctgcaggagaaagagcatatgtggaggcctgatggtagcacagaacacgctgctttgagggagttttgagaggaaaagagagggcccgaggcagggcttgagggcacgagcatgagggagatgatgggacaggagttcccaatagaggtcaagcaggaggggctggagaggctagaggagaacaggatttgtcagtgtcgtctgtggttaagttgtaactggaggatgtcaccatgaaatgacctgctggtgctcttgacaaagactggtcccgggcgcggtggctcacgcctgtaatcccagcactttgggaggccgaggcgggcggatcacgaggtcaggagatcgagaccatcccggctaaaacggtgaaaccccgtctctactaaaaatacaaaaaattagccgggcgtagtggcgggcgcctgtagtcccagctacttgggaggctgaggcaggagaatggcgtgaacccgggaggcagagcttgcagtgagccgagatcccgccactgcactccagcctgggcgacagagcgagactccgtctcaaaaaaaaaaaaaaaaaaaaaaaaaaagactggtcttcccagcactttgggaggccgaggtgggtagatcacaaggtcaggagatcgagcccatcctggctaacatggtgaaaccctgtctgtactaaaaatacaaacaattagctgagtgtggtggcgcatgcctgtagtcctagctacttgggagcagaggcaggagaatcgcttgaacctgggaggcagaggttgcagtgagccgaaattgtgccacttcactccagtctgggcaacagagcgagactccatcac

SEQ ID NO: 12 - DNA, 2781 bp, Homo sapiens
attgacttgataaacatcgagagcttctccagtcgtgtggtgtctttatctgaataccgccagagcctacacacttacctgcgctccaagatgagccaagtagcccccagcctgtcagccctaattggggaagcggtgcgtcacaggggactcaaaaatgggagaataaggactgttgccatgtgcacctgcactgctgtatttcgtgacccaccatgtcttccctagttgtgcttgatggggaggtggggagcagggctgtcgtgcaactgggcaggtcagcagttcatttctctgactgcttccttgactctctctccaggtaggtgcacgtctcatcgcacatgctggcagcctcaccaacctggccaagtatccagcatccacagtgcagatccttggggctgaaaaggccctgttcaggtaccagtgagggcacctgcccacaatcaggtgccacttctggtgcccactgcttgttgggggatcacggtgatggctgaccagggctccctgacctatacaggcctctgctatgggggtgatggccagtcctggtgtctgagtgattcccagggcccagcaaagggaccaagtttccaggtcagcgacattggatgccttccctctgcctctgggagctatgggttggcatgcattggggtagagatccaatctggcctgaggctcactcaggacttcggggtgagaggaggggaggagctgagctgccttggctaatggggttgaaatttctgatcttaaactctccactgaatattctctcagaccctgaagacaaggggtaacaccccaaaatatggactcattttccactccaccttcattggccgagcagctgccaagaacaaaggccgcatctcccgatacctggcaaacaaatgcagtattgcctcacgaatcgattgcttctctggtatgggtgggggggcgttggcaggtgtgagaaggggctgggtggctgggtggggaggcttgcaaccatagcttccacaatgatggcaatatttttcgtcaacagcagttcacctagtgagtgttgagactctgggtctgagtgaagctgagggtagagggaacacagggttggggtagtttctctctttgggctgacaggctttgtcacccacacacatccagaggtgcccacgagtgtattcggggagaagcttcgagaacaagttgaagagcgactgtccttctatgagactggagagataccacgaaagaatctggatgtcatgaaggaagcaatggttcaggtcagttgggctttgctgggtgtggagtggcatagctagctgttggaggtgatgaactgtctgagcctgaccttgtagaatggaggcaaaaaaactgatttaatgagcctgatccaataaagccagaaaggagtcctcagagcaccagaagtcttcaggcccttttagcacttttctttgaccaggcagaggaagcgggctgctgagattactaggaagctggagaaacaggagaagaaacgcttaaagaaggaaaagaaacggctggctgcacttgccctcgcgtcttcagaaaacagcagtagtactccagaggagtgtgaggtcagtaggcagcacggccctggcagagatcctaggttgtaggattttcaacagcagaacaaaggatatgctgcatcaagctgtggtcttgagtccaggcttttggactgaaacaaggacctgaaacatctaaaactacctcttgattctataggaaggagataggtgctgaacttgctcaagagcccagagagctggttgtagctcacacccgttccctgggcatgtgtgttctgtcctcggctgcctcccaggagtcctcaacctggggtagtgtaaattcctgctctgcttattatcagacgtgtgtccggaggtggtcgtgtttcacagtggggatgggggtagggaggtccccaatgtgctaagctacaatcattctccctgagattttcatttagcacccagtttcttaaacagtgtttcagggccctgtctggaacttggcatgatggttctgttgcgaccagcatggtgggtgttttttaggtttttttttttaatgggctgaggtaatttctcatgacatgttttccttctaatttgggacagcctttggggtggatttctaaagttatacccacacaattaaactatcccagaaacactgggcaatgttaacgacacgcgttcccctgccttggctacttaattgctgaagatgtaatgagcactgttctcacagcctgttcccctgtccttccctttaggagacgagtgaaaaacccaaaaagaagaaaaagcaaaagccccaggaggttcctcaggagaatggaatggaagacccatctatctctttctccaaacccaagaaaaagaaatctttttccaaggaggagttgatgagtagcgatcttgaagagaccgctggcagcaccagtattcccaagaggaagaagtctacacccaaggaggaaacagttaatgaccctgaggaggcaggccacagaagtggctccaagaaaaagaggaaattctccaaagaggagccggtcagcagtgggcctgaagaggcggctggcaagagcagctccaagaagaagaaaaagttccataaagcatcccaggaagattagaatgcaaatggacattctctgggaggtggggcataccatagcccaaggtgacatttcccaccctgtgccgtgttccccaataaaaacaaattcacagg

SEQ ID NO: 13 - DNA, 806 bp, Homo sapiens
  misc_feature 735,739: n=a,c,g, or t
gaatacttcagagatctgaagtattcattgtaatctaaggcatatcccaccacaaataagtttggaatctcaaatccagcatagtcaggtctaaagccgtcacttctggatgttctcttcaccaacaaactggctacctttaccgtgctcattgatgacgcatatgtgattcagatctctgaagtattcattgtaatctaaggcatatcccaccacaaataagtttggaatctcaaatccagcatagtcaggtctaaagccgtcacttctggatgttctcttcaccaacaaactggctaccttaatcatgttgggcttgtatttctctatattgctgagtagtgctttcatggtcctcccagttccgacaacatcctcaacaatgagaacattctttccagccagcgttgaaagatcatcgcctccgattatctgcatctcacccatggactggtcattcctgtaactttttagtctgatgaaatcaaccttcattgagacaaatcgatctgaatttcggctgatgttcttaaggtgttctacgagatcagcacagaatttgtaacctcctttaagcacacacaggaccatgatgtcactatatcctatgtctttcataatatccttggccagccgctcaattctgtccacaatgataccatgagggatgaggacatactccaagtctccataatagtgctgtgggtacgtgaataaattcaagtcataccctgnccantcatccataatcacgacgcctcgcccgtagtctggcgcctcctcgctgctcccggccatcttagaaa

SEQ ID NO: 14 - DNA, 2099 bp, Homo sapiens
tttctttctcttgcctgattgctgtgacctgaacttccaatactatgttgaataggagtggttagagagggcacccttgtcttgttccgggctacctgattttctaacaaaaagtttttcatctttcatttgtgtatatcaacatttcattcaaatacaaaccagattctcttggttactggatctttcaatgttagtgtcctgatagtttcctacacaagatccaactggctagcttctttcaaatttaacccaagaaaactcaaaggtttgtttacatttttccaagtagtccattttaatggtatgatttcaatattattttacaagattaggttattaatgaaagttaagtttatttatcactgtatattaaccatccaaatgagtcttcagagtctaagttggctaagcatcatgcagactgaaagcgtagaacatccagctactctcctgacaaagaccatttcgaaattttggatgacatttacaaacatctttctaaaagtagccagtggttcatgaggtagtgtgaagtttctgagtgaatatctgagagaggtgtgagtccagtctttgggaccattttttcctgcagggcctttactgatccacaaaggtttagcagctcttctgagagcctctcaggacaaagaggaccaaagtttgagtccagagctttgttagagtggcagtcttggtaagccattcgtatcttaggtaaaatgaaaggaaaacagccttcactgagactgcattcaatatttgagttacctgagtgaatccccaaaatctgaagccatgaaataatgagagtgaatcttgtatttctcgtgcatctaggcactggacatccagcaaaagcaatttaaaatcttcttcaaagagagatattaacattctagacatcatttctacctataatttttcatgtgtaatagccgattaaataagagagttccctgacctccgttacaggacattcaacaggggtgtgtctcatctgttcaagtgctgcatgttcaaaccccttatgggcagggaaacatgcagacaggggtgcaggagccggggagagtgcttctggactccgggccccatggtagcatctaggggtgggtgcctacaactcccagagccctagtgggcatgctacagtgctcttttagctctgccatcctcagatggcttaagttttaaccagctcagtgtcctcttggtacccatcttcttgtttggtgtccaggaagaatcaggtcacacatggacttgaaggatggtgaatgcaggggttttactggatgatggagacagctcccagtgggatggatggggagctggaaagggggtggaaagggaagatgatcctccccctggagttcactgtcccatggccgatttcttctttgactgaccctggttgaactcctctcaatgttcagatgctccttctcttctctctttctctgctgaactgctcttctgctcctctgctcttctatttatctgctcatctgcttgtctacttttgaagcctgggtttaggggtttatatgaatacaggataagggggtgtggcaggccaaaaggcaaaatttgggtgtgaaaacaggaatgcctgttcccatttagggccatgggtttccaggcttgagagtggggcctttgctggggaactgccctcttctacctagtatttccctgtatcctgtgtgtatcaccaacacactatcaaagatagtcatgtacttgaggggacaatataacaaaaatgagatgtaatatgagtaagagacaatagaaacaaatccactaatatgccagatagtaaagttacctggcacacttgctgtacaactgtgattactcaactcatggaaataaaagtcaaactgagaactttcagcaaggaactgcatactatagaaagtgacattgcaatatgaagaagacccaactacaaatttgagaactgataaataccatagctaaaattaacacctcagcagaaggctttttggggggactaggcagagatgaagagataaatagtgactacagagaaacagtgaactggaagataagtcaagaatctactc

SEQ ID NO: 15 - DNA, 764 bp, Homo sapiens
acgcacccttgcccttcgaccgcgtgctggtgaacgagcagggacattacgacgccgtcaccggcaagttcacctgccaggtgcctggggtctactacttcgccgtccatgccaccgtctaccgggccagcctgcagtttgatctggtgaagaatggcgaatccattgcctctttcttccagtttttcggggggtggcccaagccagcctcgctctcggggggggccatggtgaggctggagcctgaggaccaagtgtgggtgcaggtgggtgtgggtgactacattggcatctatgccagcatcaagacagacagcaccttctccggatttctggtgtactccgactggcacagctccccagtctttgcttagtgcccactgcaaagtgagctcatgctctcactcctagaaggagggtgtgaggctgacaaccaggtcatccaggagggctggcccccctggaatattgtgaatgactagggaggtggggtagagcactctccgtcctgctgctggcaaggaatgggaacagtggctgtctgcgatcaggtctggcagcatggggcagtggctggatttctgcccaagaccagaggagtgtgctgtgctggcaagtgtaagtcccccagttgctctggtccaggagcccacggtggggtgctctcttcctggtcctctgcttctctggatcctccccaccccctcctgctcctggggccggcccttttctcagagatcactcaataaacctaagaaccctcc

SEQ ID NO: 16 - DNA, 2393 bp, Homo sapiens
ttgcgtacacacttaggattgttatgttcatgggatgacctatatcattatgtaatgctcctgtttatccttcataatattctttgctctgaagtccacttcgtctgatattagtatagtttctgcagctgtattttagttattgatttatggtatatctttccccaaacttttattttcagcctacttatgtctttatatcaatatttaaaatgcgtttcttatatacagtatatacatgggacttgcattttattcagtcctagtcatttctgtcttttaatttatgtgttagaccaccccttttaatgttattatttgtgtaattggattaaaatgtaccatattggcaaccgttttctgtttgtttcatttttgggtttcagttttcttttgatgccttctctagtattaactgagtgttttttatgattctgttctatttcctctactgacttattatttatacttttaaaaaattgtatttatctaccttcagataatattacattgctttacatggagcctatagactttactgcagtttatacacagctccttctttccgtgctttatgctattgtggccatacctttttacatttacatctactgtgaacgcacagtacattgttttacacattcaggtatcttttagagcaattaaaaaataagaaaaaaaattgtgtccccatttattctattttcactgctctttgtttgtttgtgtagatccgggcctccatctgatgttgtgttccttctgcctgaggaacttccgtttaacatttattgtccactaggtcaagcagctggcaatgaatcccctcagtttttgtttttctaagaaagtctgtatttctctttcatctttgaaaattattttcaatgggcatagaattctggatttaacagttttcttgatattgttaccatattttttatttgcaccattttcattggattctttttaatagttgtcagcactcagctgaaagtcccatctgttattgtctacctttccctttagagccttcaaaatatgaaccatagttattttaaattctcagtcatttctaacataggtgtcacatctgaatgtggttctgattattgctttgtctctctgaagtatgtttttttcttgccttcttgtatgccttgtaattttgtgttgaaagctgtacatcttgtgtaagacagtagagacccatggaaattgtttgtatcctagaaatgtgcatgcctctccttcctagaggcctttagtgtgggagttagagtttatctagttaggagtttgctaggtttgagagatttgttggcagctatcctcactgcaggaaaggcttcatgttcctgtagagataccttgtgttttggctgggggttggatcacaagaacatcacctgttcagttctagttttaggtcttccttttgcactatgcctcagaaagggtctctctgcacattcttgttctcctgtttctctccaagcactgttttgttacctgtaatgctaagctccttagcttgacattgtggggcaagaaggaggatggggtgctgtctctgttccgattgagttacagtctggtacctgcaccattttcttaggtttgtgggctgtgaccttctcagttctcctccctctcccccaagtgttgtgggagtttctgtgtaatcctgtccctccccaaggagacaggttgtatgtgtatgtttttcctgttccctttccacactgcagtgagttttcagcagtgtcctaaggacaacagtgcgtgccgcccttctcctcacaggataggtcttttgttttcctggtggagacaggggagatggatccaggtgtagttccttgccactcctctagggttactgcttctctcccccatatctggaacacagcggacacttcttaccccaccctcctgtgagcacctgggtgatggtcatggcatagatcctgtgtgagaatgtaaccctcagaggtttcacacaatcttggcagcccactcttgactctaaccagatacttgagcgggactcccctgactggggttctgttgtgtctgccctcggtgacacaagcttgtgtctccttagattttgggctgttgattatctgggacctcggcttattgatgggtttggaaaaagttaataagtttaaagttaggctgtacgtgtgtgtgtgtgtgtgcgcgcgcgcgtgcacgtgcacgcttgtgtgtgtgtttaacgtaaacaggtcccatccttgttagactttacagcaagagcagccttgaatgaaatcatcctttctctccagtaacttattctcccagtcattcagttctctttagtctttttacaaattttacttctttaaagaagatgcgtctcc

SEQ ID NO: 17 - DNA, 1580 bp, Homo sapiens
gaggagtctcagaaaggacacggctggctgcttttctcagcgccgaagccgcgccatgctcgtcctcagaagcgccctgactcgggcgctggcctcacggacgctggcgcctcagatgtgctcatcttttgctacgggacccagacaatacgatggaatattctatgaatttcgttcttattaccttaagccctcaaagatgaatgagttcctggaaaattttgagaaaaacgctcatcttcggacagctcactctgaattggttggatactggagtgtagaatttggaggcagaatgaatacagtgtttcatatttggaagtatgataattttgctcatcgaactgaagttcggaaagccttggccaaagataaggaatggcaagaacaattcctcattccaaatttggctctcattgataaacaagagagtgagattacttatctggtaccatggtgcaaattagaaaaacctccaaaagaaggagtctatgaactggccacttttcagatgaaacctggtgggccagctctgtggggtgatgcatttaaaagggcagttcatgctcatgtcaatctaggctacacaaaactagttggagtgttccacacagagtacggagcactcaacagagttcatgttctttggtggaatgagagtgcagatagtcgtgcagctgggagacataagtcccatgaggatcccagagttgtggcagctgttcgaaaagtgtcaactacctagtatctcagcagaatatgcttctgattcctacatcgttttcaccactgaaatagttttctactgaaatacaaaacattcattaactgctataggatctgtctgctaatggtgcttaaattctcccaagaggttctcacttttatttgaaggaggtggtaagttaatttgctatgtttcttgcattatgaaggctacatctgtgctttgtaagtaccacttcaaaaaatagttctgtttactttctgcatggtatttcagtgtctgtcatacattaaaaatacttgtcactgttttaagatcttgactcttcatttgtttcagaatagctcttctactgtattctgacaactctttgctttatagcattttgttgtattcaaatgataatggtagcatttccatgcttgtgacagcatttttaagttattaatatattttatcaacctttccatcatgtctgttttcctggttttttttggttgttttttgaccagtaaaatttattttgtaataccaaataggatttaagaaaattaacgtatttctttactatggaaaaccacattgtcatttgtgacatcatctatattaaatatggttttcacattagttatttgtcacttacttggaaaatgatgctgttaggtcctggtattaaaaatctagaaaagacttgttggtttatgtgctgaaatgtctttatttataattaattttaactactatttacttcatttcggatcctgtttaacaaagatacttgagacatccatttgttttaatgaaatctgtatggatatggaaatgcttgccctaataaaagcctacatgtgcc

SEQ ID NO: 18 - DNA, 1227 bp, Homo sapiens
  misc_feature 952,1057,1060: n=a,c,g, or t
cccggagtcggggccgggcgcgcgggaaacggttaccgagcggacctggacgccctctgccttcgtcatttcctgccggccggtcggtttccggatgaaacgaggagccaggcatctccttggaaacaatgccatctttgaatgtgagagataaacctagtttcagcatgtctgcagcagagaccagtacatcaggcttattcccacaggaagcctccaaaagcctgtggcgcggcaaccatttccaggactaaataataatgtgtcagatgcctgtgagtggactgcctggccaaatgactcatgaagatattcacggaagaatagtcaaaaaccaaagaaaaggcatattctagaagcaccttcaattccatcgaggatttttgagcagctgaagaagaaagttctgaaaatatgagtgacaggactccagcacattttttttagttgtttcttacattatctttgttaacccatccgcttttgtgtataatattaagttattttccactactgcaatggctagtaatttacttaggctcagagttttactctgtatggacagagaaataggaggtaacaacagtgggagaacaaataggaacagttcactgggatgttggtccccagaaattggctttcattgaataattcctaaagggtgtcgtgtgctgaattgctttttcatagtgatgtgctgcttcttgttcatactcttatgactttaatttcacctttatctactcccagcctctgtatatgcctacgtttttaaaaataatttttggcactgaagatctgattaccatattttttcagtttaaaaattaaatcctcgcaaatagacctttggtatagttgcattctaccctaggttattttctaggatacaagaatagaacaatttctgttctttccagcattactctttactattcatatgttcttgttnagtgttttgttgttctcatattctaggtggaaatgaagggtaatctctatgttctattttcagttttctaggaaaccagaaaaacatgggtagtagaaatgtatnganatgtatgaggtctcttaaccattgtgttaaacttgcattaagcttcttttttagcaatatcgatgtcagtgttacctcttctttcctttttatttattttttttgagacggagtctcattctgtcgcccagactggttggagtgcgatgatgcgatcgcggctaact

SEQ ID NO: 19 - DNA, 1362 bp, Homo sapiens
tttttttttttttttttttttttttttgggatccaatctctttattgtcagggtcccctccctgtggccccccgccaaacctatagaaaaaacccaagcctgggagtgtcctggggaggggaggtagtatggggaaacccctgtgctctaccctctggcctgggcagtgcagacagggagggctcatggggaaggagtaggccagtaactccacctgcagaggacatggcactggctgggatgcgttgggggaggaggcgcctgctgccagctttcctctggtacccgctggggggtggcatccagggttgggtgcccggcttgaggcctggggcagcgatgcccttcacctgctggtggccattgctcctgtcaggctgcttactgcaaggccccatcatccgcgtctgtgtcctggctgtgttccagctcttcctcgctgtgtgtcaggagcccttcctcatcgccgtcgtctcgggtccgtgcttccccctggggcaggcctgcctcagaagttgtgttctcttggggggctggtggccggctgctgccaccgccaccgccaccaccactgccaccgccaccgctgccaccaccaccgccgccgccgccggcgccacctccatcacccttcttcttgccatctggattggccttttgctccgcagcgatctgctccaagcggctcagcagggcatcgatattggacttgatctgtgtcagctccgtcttgatggcctgcagctcactgctctttaacttgatcttggctgagctggtggtgacagctgtggagcgggcaaagagcttgacaggtacgttagttttgacacgccggaccaaagggactgtgacccggggtcgcttcacagggaccgccctgggcactggcacgggcgacagacggccccggtagtcgaagagcctgtcgtagaagtcgtcccggtagtaatcatagtcaaagatgtagccactgtatatggcagatgctgctctctttagccccttgggtctgtcaggcttaggctctccagccatgttgatgtccagggtctgcccggccagcacccgcccattctctcccagcacagctgcccgggcatggcgctcattggagtactgaacaaaggcatagcccttgtgcacagaacagccggccacacggccatacttagagaagatggtctccacatctgatttcttcaccagagctgtgttgaggtttccaatgaagactcgagagttgatggacttggggtcattcttgttggttacattgcttgcctgaagcttcaaggacatggtgcccaccagtaacaatgatgagcttagccagctgtttcctcctttgggttacagaaa

SEQ ID NO: 20 - DNA, 1573 bp, Homo sapiens
cccggcctgagctggagtcccccgcgccccccgcgttccgcccggccatggctgcggtggcgctgatgccaccgccgctgctgctgctgctgctgttggcgtcgccgcccgccgcctccgcgccgtccgcccgcgatcccttcgccccccagctcggggacacgcagaactgccagctgcggtgccgcgaccgcgacctcggcccgcagccctcgcaggcggggctggagggcgcctccgagtctccctatgacagagccgttctgatcagcgcttgcgagcgtggctgccgcctcttctccatctgccgatttgtggccagaagctccaagcccaatgccacccaaactgagtgtgaagcagcctgcgtggaagcctatgtgaaggaggcagagcagcaggcctgtagccacggctgctggagccagcccgcggagcctgagccggagcagaagagaaaggtcctggaggctccaagtggggccctctccctcttggacttgttttccaccctctgcaatgaccttgtcaactcagcccagggatttgtctcctccacctggacatactacttgcagactgacaatgggaaagtggtggtgtttcagactcagcccatagtggagagcctcggcttccaggggggccgtctgcagcgcgtggaggtgacctggcgaggctcccaccctgaagccctggaggtgcacgtggaccctgtaggccccctggacaaggtgaggaaggccaagatccgagtcaagaccagcagcaaggccaaggtggagtctgaagagccacaggacaatgacttcctcagttgcatgtcccggcgctcgggtctgcctcgctggatcctggcctgctgcctcttcctctccgtgctggtgatgctgtggctgagctgctccaccctggtgaccgcgcctggccagcacctcaagttccagcctctgaccctggagcagcacaagggcttcatgatggagcccgattggcccctgtacccgccgccgtcccacgcctgtgaggacagcctaccaccctacaagctgaagctggacctgaccaagctgtaggcctccactggccccatcactgccaactgcagggggcccctcgggcctcacttgccctgagcccaggagtccaagggcagggtgggtccagccttgagcccctccacccccaaatccttcctctcctcccagtcccaccccttgccccacggagtcctggggacgcagtgccccagctgggaagagggcgggatcgggcactggttcctccttgtccccgctttcttgggggcttgctactttttgtcttctattgtgtggctttctgagtatttgaaccccagtcctgtgtcaccttcctttttccttctatgtcccctctctgcgggggggcgctgaggctgagggggagctgcgtcttgctagggcttcccccttctccccatcccggtctccagagacccagcttctgagagacagggtgtgggcatctccatgcccctataaagcgtgcctggggcttgtctggggctggggaggaataaaccatgtatatg

SEQ ID NO: 21 - DNA, 1719 bp, Homo sapiens
ggctgtgggatacgtcatgtgctccttgctctacccactggtcaccttcttcttgctgtgcctctgcatcgcctactgggccagcactgctgtcttcctgtccacttccaacgaagcggtctataagatctttgatgacagcccctgcccatttactgcgaaaacctgcaacccagagaccttcccctcctccaatgagtcccgccaatgccccaatgcccgttgccagttcgccttctacggtggtgagtcgggctaccaccgggccctgctgggcctgcagatcttcaatgccttcatgttcttctggttggccaacttcgtgctggcgctgggccaggtcacgctggccggggcctttgcctcctactactgggccctgcgcaagccggacgacctgccggccttcccgctcttctctgcctttggccgggcgctcaggtaccacacaggctccctggcctttggcgcgctcatcctggccattgtgcagatcatccgtgtgatactcgagtacctggatcagcggctgaaagctgcagagaacaagtttgccaagtgcctcatgacctgtctcaaatgctgcttctggtgcctggagaagttcatcaaattccttaataggaatgcctacatcatgattgccatctacggcaccaatttctgcacctcggccaggaatgccttcttcctgctcatgagaaacatcatcagagtggctgtcctggataaagttactgacttcctcttcctgttgggcaaacttctgatcgttggtagtgtggggatcctggctttcttcttcttcacccaccgtatcaggatcgtgcaggatacagcaccacccctcaattattactgggttcctatactgacggtgatcgttggctcctacttgattgcacacggtttcttcagcgtctatggcatgtgtgtggacacgctgttcctctgcttctgtgaggacctggaaaggaatgacggctctcaggagcgaccctacttcatgtcgcccgagctgagagacatcctgttgaaggggagtgcggaggaggggaagcgggcagaagccgaggagtagagatggaggacctggagaggaatgacggctcggccgagaggccttacttcatgtcttccaccctcaagaaactcttgaacaagaccaacaagaaggcagcggagtcctgaaggccccgtgctccccacctctcaaggagtctcatgccgcagggtgctcagtagctgggtctgttcccccagccccttgggctcacctgaagtcctatcactgccgctctgcccctccccatgagccagatcccaccagtttcttggacgtggagagtctggggcatctccttcttatgccaaggggcgcttggagttttcatggctgcccctccagactgcgagaaacaagtaaaaacccattggggcctcttgatgtctgggatggcacgtggcccgacctccacaagctccctcatgcttcctgtcccccgcttacacgacaacgggccagaccacgggaaggacggtgtttgtgtctgagggagctgctggccacagtgaacacccacgtttattcctgcctgctccggccaggactgaaccccttctccacacctgaacagttggctcaagggccaccagaagcatttctttattattattattttttaacctggacatgcattaaagggtctattagcttcc

SEQ ID NO: 22 - DNA, 1337 bp, Homo sapiens
tttttttttttttttttttttttttttttgggttcttaatttcctttaattaggataacctttttcttaaagtgaagacaatgcttttattacatcttttccttcggaaaagataggctgtattttctagcaattacgaatttgttatatatgacgatctggttcttggaacgttcttgaagctagtgtctctaaggcaggtgtgtacagcaagacgtgaataacacagcaatcgatgatgaaagcattataagacaattgagtttgtcagaactacaaaatattgctgagtgtggattgctctgaaatctgaaaacattacttgtgaattgcttctatccaaaatgcagacacaatgctgggtattggtttacttgtttccgatttttcaaccctcttttccaggcaaaagagggttgtatccaaacgatacagacccacagagtctaacagatgtctctatattccttctcctcgaactctcagaggatccagaactgcagccggtcgtcgctgggctgttcctgtccatgtgcctggtcacggtgctggagaacctgctcatcatcctggccgtcagccctgactcccacctccacaccccatgtacttcttcctctccaacctgtccttgcctgacatcggtttcacctccacacggtccccaagatgattgtggacatccagtctcacagcagagtcatctcctatgcaggctgcctgactcagatgtctctctttgccatttttggaggcagggaagagagacatgctcctgagtgtgatggcctacgaccagtttgtagccatctgtcaccctccatatcgttcagccatcttgaacccgtgtttctgtggcttcctagatttgttgtccttgttttttttttcttttttttttttccctcagtcttttagactctcagctgcacaacttgattgccttacaaatgacctgcttcaaggatgtggaaattcctaatttcttctgggaaccttctgtgacaccttcaccaggaacatcaacatgtatttccctgctgccgtatttggttttcttcccatctcggggacccttttctcttactgtaaaattgtttcctccattctgagggtttcatcatcaggtgggaagtataaaccttcaccacctgtgggtctcacctgtcagttgtttgctgattttatggaacaggcgttggagggtacctcggttcagatgtgtcatcttccccgagaaagcgtgcagtggcctcagtgatgtacacggtggtcacccccatgctgaaccccttcatctacagcctgagaaacagggatatgaaaagtgtcctgcg

SEQ ID NO: 23 - DNA, 786 bp, Homo sapiens
tgtttgactcatggtttattagtctggattacttaagaacaatatgttgattttaatgttaattcccactaaatatataatattgataaatacatgtgaaattaatattgtttggaaaatgtagaggacacagctgggaattatgaatgcttttttcttaataggtttggtgtgtgtggctttgaatggttctgctgatgcatcatggaaagacagcagggaactgtagcctgccatcaaaactgtatcaactcttttaatgagcatgtgactgtattaggtacattttgaagaatataagtactgatgataaagtctagtatgcataataggattttggaggcatttcaggaattttccttttatagtatgctttttaggcatctgtatgtgtaatatcatagtatcatttattgctgggatggatcgaaaagcactgcttttacttttctgataagtatcaaaatgattttccagtaccaacttgactggcttttaattattgtcacacacacacaaaattcaactcctcaaggtttgggaaaattgtgtatttttttgtatacaagataaaagtgtcataaaaaggaatggatgaattgttgataggaacattagcagttaatttttacctgatactgagtttactgtaaaataggaaatgcataggaaggaatacctcctaaataatatgccttatagaatgatgaaatcttaccatagttcatactgaaaatgttgtttatttaaaagtattgtggagtgttgaaaataaagatacacaat

SEQ ID NO: 24 - DNA, 1679 bp, Homo sapiens
ggcggcggaggaacctcagcagcagaagcaggagccgctgggcagcgactccgaaggtgttaactgtctggcctatgatgaagccatcatggctcagcaggaccgaattcagcaagagattgctgtgcagaaccctctggtgtcagagcggctggagctctcggtcctatacaaggagtatgctgaagatgacaacatctatcaacagaagatcaaggacctccacaaaaagtactcgtacatccgcaagaccaggcctgacggcaactgtttctatcgggctttcggattctcccacttggaggcactgctggatgacagcaaggagttgcagcggttcaaggctgtgtctgccaagagcaaggaagacctggtgtcccagggcttcactgaattcacaattgaggatttccacaacacgttcatggacctgattgagcaggtggagaagcagacctctgtcgccgacctgctggcctccttcaatgaccagagcacctccgactaccttgtggtctacctgcggctgctcacctcgggctacctgcagcgcgagagcaagttcttcgagcacttcatcgagggtggacggactgtcaaggagttctgccagcaggaggtggagcccatgtgcaaggagagcgaccacatccacatcattgcgctggcccaggccctcagcgtgtccatccaggtggagtacatggaccgcggcgagggcggcaccaccaatccgcacatcttccctgagggctccgagcccaaggtctaccttctctaccggcctggacactacgatatcctctacaaatagggctggctccagcccgctgctgccctgctgcccccctctgccaggcgctagacatgtacagaggtttttctgtggttgtaaatggtcctatttcacccccttcttcctgtcacatgacccccccccatgttttattaaagggggtgctggtggtgagccgtgtgtgcgtgtccctgctctgctgcccgcctggctgctctgtctgctgccccctccccccaggtgggtccccctgcttttcacctatctactcctgagcttccccaacaggagcaggtttgaggggccaggcctcttggaggcccctcctgcttcgttgggttctgcttccttcccttcttagctggctcaggggcttctatgggatcctggaagttccttagggacttgcccagggtcccagggccacccacacttcatctgctccctcataggccccacctccacgtcccggctgggccccagaccccagcttcctgccctccaccgggagtctgcatggttgggagtcctgggtggaggggcctttgtgaggctggacccggctcagggcaggtggaggagctgggcctcccacagggtgcccgggcagtgccatcctggtgggggagggcagccttcaaacgtgtggggtctacagtcctcaggtctaggcagggctgccggttctccacctccccatccgccccaggccccctgcctgtgcctgccttgcaccccctctgcttgggccacggtgtctctgcattgcctgcctttttgccttcacctcttttcttccccgccccctgcacattcggggtctcagcccccaggctgtgagctccttgggggcaggccctcaataaatgtgaactgctgctac

SEQ ID NO: 25 - DNA, 2037 bp, Homo sapiens
tatgatggcggccatggcgacggctcgagtgcggatggggccgcggtgcgcccaggcgctctggcgcatgccgtggctgccggtgtttttgtcgttggcggcggcggcggcggcggcagcggcggagcagcaggtcccgctggtgctgtggtcgagtgaccgggacttgtgggctcctgcggccgacactcatgaaggccacatcaccagcgacttgcagctctctacctacttagatcccgccctggagctgggtcccaggaatgtgctgctgttcctgcaggacaagctgagcattgaggatttcacagcatatggcggtgtgtttggaaacaagcaggacagcgccttttctaacctagagaatgccctggacctggccccctcctcactggtgcttcctgccgtcgactggtatgcagtcagcactctgaccacttacctgcaggagaagctcggggccagccccttgcatgtggacctggccaccctgcgggagctgaagctcaatgccagcctccctgctctgctgctcattcgcctgccctacacagccagctctggtctgatggcacccagggaagtcctcacaggcaacgatgaggtcatcgggcaggtcctgagcacactcaagtccgaagatgtcccatacacagcggccctcacagcggtccgcccttccagggtggcccgtgatgtagccgtggtggccggagggctaggtcgccagctgctacaaaaacagccagtatcacctgtgatccatcctcctgtgagttacaatgacaccgctccccggatcctgttctgggcccaaaacttctctgtggcgtacaaggaccagtgggaggacctgactcccctcacctttggggtgcaggaactcaacctgactggctccttctggaatgactcctttgccaggctctcactgacctatgaacgactctttggtaccacagtgacattcaagttcattctggccaaccgcctctacccagtgtctgcccggcactggtttaccatggagcgcctcgaagtccacagcaatggctccgtcgcctacttcaatgcttcccaggtcacagggcccagcatctactccttccactgcgagtatgtcagcagcctgagcaagaagggtagtctcctcgtggcccgcacgcagccctctccctggcagatgatgcttcaggacttccagatccaggctttcaacgtaatgggggagcagttctcctacgccagcgactgtgccagcttcttctcccccggcatctggatggggctgctcacctccctgttcatgctcttcatcttcacctatggcctgcacatgatcctcagcctcaagaccatggatcgctttgatgaccacaagggccccactatttctttgacccagattgtgtgaccctgtgccagtgggggggttgagggtgggacggtgtccgtgttgttgctttcccaccctgcagcgcactggactgaagagcttccctcttcctactgcagcatgaactgcaagctcccctcagcccatcttgctccctcttcagcccgctgaggagctttcttgggctgcccccatctctcccaacaaggtgtacatattctgcgtagatgctagaccaaccagcttcccagggttcgtcgctgtgaggcgtaagggacatgaattctagggtctcctttctccttatttattcttgtggctacatcatccctggctgtggatagtgcttttgtgtagcaaatgctccctccttaaggttatagggctccctgagtttgggagtgtggaagtactacttaactgtctgtcctgcttggctgtcgttatcgttttctggtgatgttgtgctaacaataagaagtacacgggtttatttctgtggcctgagaaggaagggacctccacgacaggtgggctgggtgcgatcgccggctgtttggcatgttcccaccgggagtgccgggcaggagcatggggtgcttggttgtttccttcctaataaaataaacgcgggtcgccag

SEQ ID NO: 26 - DNA, 681 bp, Homo sapiens
tttttacaagatgagaagttacagttcatctcccctgttcagatgaaacccttcaaaaccaacaaggcagctaggatctggcattccgttccgtttctgccaagcactcccgaaccagtcctctagcgtgaatgatgccgcgcttcagcctctccatggcactcttgctccctgcgtacgtgggtctgatctccttccccagctcttcaatgatggccagcagctccgcgtatttgctttggggcacctggctgttcccagccgcttttttttttttttttttttttttttttttattttttttttttttttttttttttttttttttttttttttttttttttttttttttttttttttttttttttttttttttttttttttttttttttttttttttttttttttttttttttttttttttttttggggtaatgaaaataagctttattacatcaagtaataaatacatacaaagatgcaaacagttttagtcattttcttccagatgtttttatcaacttacaataaacgcagaactgagatctacttacagtcttagtatgaaagtgttcgggggtccttgttaggtttggtgggttgctctttcttctgtatttataacttgtgcatttttaaaaattgactttgaagcactaatagtcatgcaaatgcttaagc

SEQ ID NO: 27 - DNA, 1514 bp, Homo sapiens
ttttttttttttttttttttttctgagaagtcactggtgtttaatggaaaggtatcctattagtccttggttaagataaggcagtaagagtatcactaatactatgtttttgcttagaatgaggctgatccttccactggcgtcttcacgggcaattagttccctctcttttgctcctagaaacacaggtaggagctgtctgccccctattgctgttgcattttctgagtgtgttgaaggctcatctagtctcatcacagcagcttccccagtggggatggagcgctgtatattgcattgtagcatctctccaggaagtgcacgggccccacagaggaaaacacaggcatctttctttctgactcctcttctgtttctcttagggacggggcccataaatgattccttcacatgatcaatcagaatgcgagacactgttgactaaaacataaagcaagtagccctgatttcagagaaatggagttacaaataacattttcaacagtgccttaacttgcaagggtagcttttactgcagaaggatatcagctccttttgtctacctatcagaagagaaacaaaccatttccgtcgaactagaaatgcttagctcttatgagaatattgtgcttttaaaaaaaattcaaatgttaacattatttgcagtctgtgttctaaggtttcaatttgttttttctctagtccatttgatcattgtctctggtgagcgatataggaatattaatttggcatagagatcttcttctagctccagttctcctgtctctcgaactaaaaaaatatctgtgcacaacttcaaaattcgatccacatttggaagctcttcaaacatgatggagtgagaaatcccactgaagaattcacggacaaatttcccaatcacaaggacaactgaagcatataatcccataataccatagccagccaggaaccccagacttgggggactgactttgtcattgaagaccaccagttccagggcctgagagttcggattgtatattctgtttccagtcaggttgagaacccaccactcactgttatatttagttgtattgtctctggacaaaatgatggtaatatccatgaaattattttcagataaaagttgctttataggttttgagttagaatcactaggtgctttcacataatatggataaatcttttctatggtcactggtgtttttgaactttctgtgctgttgcctgctatcattttagcgatattctttcgagtaatatttttaagaggaaaagaaagcttatctgttgctatttccgattttgcacccagacttaagtttctctgaatactccatgaaaaaacaacagagaagctactattggggtccaggagttcgtgtatcattttctgcttactgggtgggctgatggtccacaaagaatttgagtttccttccagttctgctactgttatgtcttctttttcataattttccagaaattgcatagcaccggaaccttagaaa

SEQ ID NO: 28 - DNA, 2827 bp, Homo sapiens
attccgtgtaccagattctactgaagaaaggtagccatggaagagaatatggaagagggacagacacaaaaagggtgttttgaatgctgtatcaaatgcctggggggcattccctatgcctctctgattgccaccatcctgctctatgcgggtgttgccctgttctgtggctgcggtcatgaagcgctttctggaactgtcaacattctgcaaacctactttgagatggcaagaactgctggagacacactggatgtttttaccatgattgacatctttaagtaggtgatctacggcatcgcagctgcgttctttgtgtatggcattttgctgatggtggaaggtttcttcacaactggggccatcaaagatctctatggggatttcaaaatcaccacttgtggcagatgtgtgagcgcttggttcattatgctgacatatcttttcatgttggcctggctgggagtcacggctttcacctcactgccagtttacatgtacttcaatctgtggaccatctgccggaacaccacattagtggagggagcaaatctctgcttggaccttcgtcagtttggaattgtgacaattggagaggaaaagaaaatttgtactgtctctgagaatttcttgaggatgtgcgaatctactgagctgaacatgaccttccacttgtttattgtggcacttgctggagctggggcagcagtcattgctatggttcactaccttatggttctgtctgccaactgggcctatgtgaaagacgcctgccggatgcagaagtatgaagacatcaagtcgaaggaagagcaagagcttcatgacatccactctactcgctccaaagagcggctcaatgcatacacataaatgcatcttcctgttctttctaccatttgaatgcattggtgtttaactaagggccatccaaccatccaacctttaaaaaacaaaacgaaagtgcttctcatcaatgatatgtaaggtgacttatgaatcacctgagtacaattctttgttgtttagcacttaaatttcccaatttattaaattgatgtaaatcagatcttttctacaagctcctatccagccttttttttgaaatttctcaaactcatttactagttctgtaaaatcaaagatactaacattgtcaaatgcaaagatttgtttgatttttaaccacttcccatgtgttatacataacaccttttgcattatttcttatgttttgaaaagaaaatagctttttatactttttagttttgatttcggtaactagtttaactacaggtaaccttcaaagggaccattgtacattatgaacaatagatagagatgacatcttgatgactcttgaaatatggaaattttgtctgaagatcagtggccatattactgtaggccctggttcatgttttcatcaatctaaggtgcaatttctaaatttgtaagagtaggtttaaaaaaaaaagtgcttcttatctttgttaacattgtacttttccttgatgttcttaaaaggtatttccctcagattactcatgtttatgttgtgagcatgtagaaacagtaatgctaatgcatggctagttgcctttttaagattgtgacaccaggcttaccttttaaagtttagtatatagagacaattttaatggaaataactactgtagactattgaagaatgatctctttgtgatttaagaagtggctggattggaacttttaatatgctaatgtggaaaattaattacctttatgaaggtggtttattacaaataagcacactaacccctcggaagttgttttacctactttaaaagttttaatggattgcacctctgtaaactattcctaaaatgtgtatgatatatttgaaaaggcttccattaatataatagctttgcttgcagccttccaatctatgttggtttacctgtagtgttttataaagtgtggtcagaggcccctatagaatgtattgtttgaaagtgtagtgatatatttgtgtttttatttcaagtaagtcattttaaccgaatgttcattcatattcatttataaaaagtacctgtatcaaaggaattttaacaaagagcaatcagtattattggaccaaatttggtgtttgttttcaccttgacgctcttcttttcattatttctaatgctacaagaatgctgtaaagtgtcttctaaaatgatgtagcctgacaagacatttttttcagtgtataaaactaggtagtattgtgcactgatttgaccattgtgaaatcctttctcagtgtaactgcatttctaataaaaatttattgagtgaaacaatctttgtacaatgactagtcatgcatcatcagtaattttacaagttcttgtagtaggtagggggtactactagggatatctgtggcatgattatgcattccgtagtattatttaattaatttggggttcattttgcttccttttctttatgcttagattatcttactggttcaacatttttctgatatatgcagtattacagatattcagcaaaagtattaatgggcttctttaaattctatattatagtatttcagttccgtgtcttaacagtttgtgataatttctaaaactgtcttttcaacttatgtaatgatgttgacacttttggcttttatttctggtattagagtttgtattttcacagagtgctttgtagcaggcattacaattaatctgttttgtacataaatgtgccaacagcttgatggtggcgtttttgaaatgtagaacagagtgcttgcaaaatgtaataaatacacttgtgtactttg

SEQ ID NO: 29 - DNA, 1194 bp, Homo sapiens
ctttaagtttggtaaaagagttggatgcctttccgaaggttcctgagagctatgtagagacttcagccagtggaggtacagtttctctaatagcatttacaactatggctttattaaccataatggaattctcagtatatcaagatacatggatgaagtatgaatacgaagtagacaaggatttttctagcaaattaagaattaatatagatattactgttgccatgaagtgtcaatatgttggagcggatgtattggatttagcagaaacaatggttgcatctgcagatggtttagtttatgaaccaacagtatttgatctttcaccacagcagaaagagtggcagaggatgctgcagctgattcagagtaggctacaagaagagcattcacttcaagatgtgatatttaaaagtgcttttaaaagtacatcaacagctcttccaccaagagaagatgattcatcacagtctccaaatgcatgcagaattcatggccatctatatgtcaataaagtagcagggaattttcacataacagtgggcaaggcaattccacatcctcgtggtcatgcacatttggcagcacttgtcaaccatgaatcttacaatttttctcatagaatagatcatttgtcttttggagagcttgttccagcaattattaatcctttagatggaactgaaaaaattgctatagatcacaaccagatgttccaatattttattacagttgtgccaacaaaactacatacatataaaatatcagcagacacccatcagttttctgtgacagaaagggaacgtatcattaaccatgctgcaggcagccatggagtctctgggatatttatgaaatatgatctcagttctcttatggtgacagttactgaggagcacatgccattctggcagttttttgtaagactctgtggtattgttggaggaatcttttcaacaacaggcatgttacatggaattggaaaatttatagttgaaataatttgctgtcgtttcagacttggatcctataaacctgtcaattctgttccttttgaggatggccacacagacaaccacttacctcttttagaaaataatacacattaacacctcccgattgaaggagaaaaactttttgcctgagacataaaacctttttttaataataaaatattgtgcaatatattcaaag

SEQ ID NO: 30 - DNA, 2579 bp, Homo sapiens
gccgcttttttttttttttttttttttttttttttgaaaagataaatattatttataccagccacccgcctcacagccgacaccctcatcttctagtgccccccaaagccctgccctggctgtccagtccctctggacatgggcaggtcagtgggggctgcggccggtccacacctggagtgtaagcagcacgttgtcccaagagccacttgggcaggggtcttctcctggcttgcttagctagtggtcctgccccagaggccatccagggctacaagctctgccccagaggctgggactgggacacccctggctcttgctcacaggccactctgccccctccagcccccatcttctcacaaaagaggaaaaggagcaggaggtgactggtatggggtggttaagtgaggggaagctggcctggcctgcagggtactaaatgttcagggtgaaggcagcaaggcagggcattgctggtggcagtgccacagtgccagtaaggttctggaggcctgggggggtgactctagtgctgtggccgcaagtctgatgatgacacctgacttctgtctccagggttcctgagtgagggcccttggttcccagtggtgtcggaaggcatcaccgaggtccagaggcgtcatcgtggtgagtcagaggctgtcacgagttgcccatgatgccccagggcagcaaatggcctccccacggttgccgagggcagccccagggcccagtgggctggccttcttgtgctctgggagaagacagccttggagggacatgcgtgctgctgtaggtgtccagcgccccatttcaattcattcccatgtcccttctccagggaggattgggcagggaagccagaggccctgggcccggcccagtcctgtaggtgactttccactcatgagctagagtcctgcacggctgcagggggagagcggcccccccaggctgtcagtgccagctgctcctgggggagtgggcatgagacctaacaggtcacctccacaggcagggtggtcagggagcctggccgtcatccccccagccacagctctttgggggctgctccatgacctgccagctcagactgctgtggactgcttgatgctgtgaaagctgacacgggttggggaggtggggatggacatggcacgggccactcgggcacggatcgagtgcttgtcctgccaccggtgccacctcttccggatggcagaacggacctcactattgaggaaacagtagaacacagacacaaagaagccctggaaggattccaggaaggagttgaagtagatgaagacgacccgggagacctcatcctccccgggattgacgaagaacagcatgtaggtgatgcccaggaggggcagcagcaccagagtggctttcacagccttcctgtactgaatggtctcagacgtggtggatgcccggagcttggtcatgaggatgcggacgatgttgaaaaggaagatgaaattgatcagcaggaccaggatcatggggccctggtagatgtagtcggtgtacaccccaggccttttgccaaaccagcacttctcattgtcgtagtacagcttcccaatggcccaggccacaatgatggggaagggcacaccccagccaatgcagatgaacatccatttgcgcagccggtcagtggagtaggtgagcacgatggctgtgtgcaggtagcagccctcgccgaacatccagaagaagttggtcacatggaagtagttgtaggcggctgtcaccaacctgcaccagcccacgttgctctggtggacctcggggctcatggttagctggaccacgaaccaggtggcgttgcgcaggatgaaggcggagatgaggttccagtggatgatgtttcgcaggcaccggatgctcctgagccgcagaaagaggacaaaggccaccaggagggccaccagggagatacagtggcccaggtagttgatgatgactgcgacatggtagtgcaccttgctttttttctcctcattgaggatctcctggcactcggagtaattcacgcgggcggcccagctgccattggccaggcactcccggtagccattgtttgtggtattgtagcggacaccatagaaaaaggcagggcagggccgaaccactagctgccccgcagggctgcggggccagcaggtgccaatgaggtccacggatgcgttgcactgcagtcctgagatgttgctggccagggacaggctctcgcagtgctggtcctggagggaggcagagacggggttcagccccagaaggagaagggccttgacgagacggagctgcgggtgccctcccatcctcgggctcgctcggctaccgtcctgaatgcccgggtcctacggacatcccagaggaaccggcgggcggctgcgggctcgggcggcacggggtgggcggccgggctcctcggtcgctgcctggtgaggagatgcccggctcggcgcttcccggccccgcggcccggcccggcccggcccggctctcgctcgccccttcccggggaagtctggccgccgtttcccgacgcagcccggccc

SEQ ID NO: 31 - DNA, 1345 bp, Homo sapiens
tttttttttttttttttttttttttttcaaacagtctgatttaattaggaagttaaataagttgaggtggggtggagtgggatcatcagaaggctgacatgggaccgctggagttggcaatcatagcagtgtgaggttggcaaggggagcaacccccttcaagacaaggcacaaactatttggcaaggagagatgaggggtgggacctcactgtcaatggacatgctcagggaggccagtgggttacatgcaacaggaggatcattcaggcaacttcagctatgaggctgggcatctgtgagggctgaaggctcaggctgttctcaaaggcttgtgattcacctgggagatgctcacgcctgtgagtctttccacactctctggcaggcgagttagaatgtccagtacttccccagtcactttggctgcccccatggtcccactgccgctggacaccagtgtgatcttattggctgaagtcaagggaccactgatctcctctgccacctggggcagcttctctagcagcatgtccagctgagcagcctcttggtacagctggaaggcttctgccttcttggccatctgctcagcctcggctcgggctcgggcccctatggcaaaggcctcagcttccccacgcatccgcacagacgcggcttctgcctccgcctgcataattagttgggacttctctgcctcggctaggcgctccagcttgtagcgctccgcttccgctggcttccgcacccgggcctccagctccttctcccgccgggcgatctcctgctcctgcactgccacctgctgggcccgctccaccacctgcacctgcacccgctgctcctcaatctgctgcttagtcttggccacctgaagctgataggccaggtcagcctgtgctcggcgggtgttgacctcgatgtcataggcggccttcttcagttcgtaatctctctgtgccttggccatctcgatctcactcaggtactgagcagacaccttttcctgcttggctttagcttcccggatcccagcatctctcttggcctctgcttctccaatccgtgcatctttttggacttgagctgttcgagccttccccaaagagtgcaaatagtcctggtcatcgtgaatgtccttcagagtgtagctaaccacactgatgcccatgttgaccaggtctgaggaggccactttgaaaacctgttctgagaatttctgcctgtccttatagatctcctccacagtcatgtgggccatgatggccctctggtggccctctaacgtctccagggcaatgtgggcaatctcagcctccgtcttccccaggaacatctgacag

SEQ ID NO: 32 - DNA, 2085 bp, Homo sapiens
agtaaagaagagaatcgtggggaataagaacttccacgaggtgatgctggctctcacagtcttagaaacctgtgtcaagaactgcgggcaccgcttccacgtgctggtggccagccaggacttcgtggagagtgtgctggtgaggaccatcctgcccaagaacaacccacccaccatcgtgcatgacaaagtgctcaacctcatccagtcctgggctgacgcgttccgcagctcgcccgatctgacaggtgtggtcaccatctatgaggacctgcggaggaaaggcctggagttccccatgactgacctggacatgctgtcacccatccacacaccccagaggaccgtgttcaactcagagacacaatcaggacaggattctgtgggcactgactccagccagcaagaggactctggccagcatgctgcccctctgcccgccccgcccatactctccggtgacacgcccatagcaccaccccggaacagattgggaagctgcgcagatgagctggagatggtgagtgggaacgtgagggtgatgtcggagatgctgacggagctggtgcccacccaggccgagcccgtagacctggagctgctgcaggagctcaaccgcacgtgccgagccatgcagcagcgggtcctggagctcatccctcagatcgccaatgagcagctgacagaggagctgctcatcgtcaatgacaatctcaacaatgtgttcctgcgccatgaacggtttgaacggttccgaacaggccagaccaccaaggccccaagtgaggccgagccggcagctgacctgatcgacatgggccctgacccagcagccaccggcaacctctcatcccagctggcaggaatgaacctgggctccagcagtgtgagagctggcctgcagtctctggaggcctctggtcgactggaagatgagtttgacatgtttgcgctgacacggggcagctcactggctgaccaacggaaagaggtaaaatacgaagccccccaagcaacagacggcctggctggagccctggacgcccggcagcagagcactggcgcgatcccagtcacccaggcctgcctcatggaggacatcgagcagtggctgtccactgacgtggggaatgatgcggaagagcctaagggggtcaccagcgaagaatttgacaaattcctggaagaacgggccaaagccgcggaccgattgcccaacctctccagcccctcagctgagggccccccgggtcccccatctggcccagcgccccggaagaagacccaggagaaagatgatgacatgctgtttgccttatgagtgtggggtctggcaccctgcagcccaggtccccactgctctcacacccttaggctgggacctccctccctcctctggtgttaaggctgctttgggggtggcttgttacccccttttcctcctctttgaagacggagctgccccagctgtggctgggggtgtggaggcagtgggatgaactgggggacaggtctgcgctgcagtgggatctggctgctctgcctcctttcccaccccagctgaccatgagactttgctgagaagtggaggccccaggacaggctggctggctggctggctgcttgacccagtgtgactctccttcactgagtgataccctgctccgggcccatgccccaaggagcccttcagagcccacactgccagtcgaggcctggctggaggctggccacagtggaaattctgccgagcctcttgtcccttccctgctctgctgcatggggccccatggctttggctggccactgagggtagggtgtggaggtgtggaggccccctgaggagctgcggcggcccaggtacgaagctgcaactctgcgcgcagtgggcgagatctcatcagccccaggctgcaggtgaggcttcaggggatgctggggccccactgcccctccgctgccttgccctccatccttcctctgttccttctggccgggcaccacagcactggggctcacctcttggttgatcctcttgtactgggagaggtgccttttgtatccccaattaaaggtagaaaaccc

SEQ ID NO: 33 - DNA, 2300 bp, Homo sapiens
cggaaagccttcctgctcctgctgctcttggggctggtgcagctgctggccgtggcgggtgccgagggcccggacgaggattcttctaacagagaaaatgccattgaggatgaagaggaggaggaggaggaagatgatgatgaggaagaagacgacttggaagttaaggaagaaaatggagtcttggtcctaaatgatgcaaactttgataattttgtggctgacaaagacacagtgctgctggagttttatgctccatggtgtggacattgcaagcagtttgctccggaatatgaaaaaattgccaacatattaaaggataaagatcctcccattcctgttgccaagatcgatgcaacctcagcgtctgtgctggccagcaggtttgatgtgagtggctaccccaccatcaagatccttaagaaggggcaggctgtagactacgagggctccagaacccaggaagaaattgttgccaaggtcagagaagtctcccagcccgactggacgcctccaccagaagtcacgcttgtgttgaccaaagagaactttgatgaagttgtgaatgatgcagatatcattctggtggagttttatgccccatggtgtggacactgcaagaaacttgcccccgagtatgagaaggccgccaaggagctcagcaagcgttctcctccaattcccctggcaaaggtcgacgccaccgcagaaacagacctggccaagaggtttgatgtctctggctatcccaccctgaaaattttccgcaaaggaaggccttatgactacaacggcccacgagaaaaatatggaatcgttgattacatgatcgagcagtccgggcctccctccaaggagattctgaccctgaagcaggtccaggagttcctgaaggatggagacgatgtcatcatcatcggggtctttaagggggagagtgacccagcctaccagcaataccaggatgccgctaacaacctgagagaagattacaaatttcaccacactttcagcacagaaatagcaaagttcttgaaagtctcccaggggcagttggttgtaatgcagcctgagaaattccagtccaagtatgagccccggagccacatgatggacgtccagggctccacccaggactcggccatcaaggacttcgtgctgaagtacgccctgcccctggttggccaccgcaaggtgtcaaacgatgctaagcgctacaccaggcgccccctggtggtcgtctactacagtgtggacttcagctttgattacagagctgcaactcagttttggcggagcaaagtcctagaggtggccaaggacttccctgagtacacctttgccattgcggacgaagaggactatgctggggaggtgaaggacctggggctcagcgagagtggggaggatgtcaatgccgccatcctggacgagagtgggaagaagttcgccatggagccagaggagtttgactctgacaccctccgcgagtttgtcactgctttcaaaaaaggaaaactgaagccagtcatcaaatcccagccagtgcccaagaacaacaagggacccgtcaaggtcgtggtgggaaagacctttgactccattgtgatggaccccaagaaggacgtcctcatcgagttctacgcgccatggtgcgggcactgcaagcagctagagcccgtgtacaacagcctggccaagaagtacaagggccaaaagggcctggtcatcgccaagatggacgccactgccaacgacgtccccagcgaccgctataaggtggagggcttccccaccatctacttcgcccccagtggggacaaaaagaacccagttaaatttgagggtggagacagagatctggagcatttgagcaagtttatagaagaacatgccacaaaactgagcaggaccaaggaagagctttgaaggcctgaggtctgcggaaggtgggaggaggcagacgccctgcgtggcccatggtcggggcgtccacgccgaggccggcaacaaacgacagtatctcggattccttttttttttttttttttaattttttatactttggtgtttcacttcatgctctgaatactgaataaccatgaatgactgaatagtttagtccagatttttacagaggatacatctatttttatcattatttggggtttgaaaaatttttttttacaccttctaatttctttatttctcaaagcagataattcttctgtgtgaaaatgttttctttttttaatttaaggtttaaaattccttttccaaatcaaaaaaaattccccccc

SEQ ID NO: 34 - DNA, 1468 bp, Homo sapiens
agttttttcaatccctgtttttgaataaatattctcagcgaccaggaagttgtgaaatactggtgttgtgggcagcaaaacctccagaaaatgggtgcagctgaggtcctggaggacccccatgtgtgaatccaccaacctcaattaggcctcagccccttccacatgccagttctggggcttcaggaccctttgggggtgaagtcgtccagcctcctacttctaataccaaactggtccagttgtcttctgggcattttagaagcaggtggaggagtttcagtagctttgtccagactctccttggtgcagatgtcagggaagtccttctgagtgtctctccagtggttcttcctgctgtggctgtaacccagatactgccctgcttggcggatcactttggttgtgagcccttagggccctcttctttgtgacacctgcccatcttggcctggggaccacctgtgagtttcacaaaccacctatgctggaggggcccttagagatgctgcagggtgcagatgggaaagctgaggcctaaggaagggtcggcctatgcacagtgctatgcagtgttgggcccagaccgcaggattcctggctctcagaagtccgtgggcctcaccaggcagcagacaccctttctcctcctgttccagacccagatatccagcagggcacctgctgtgacctgtgcaggggttggatgagcccccacggaaaccaccctcctttctcctgctcaggagagagaactctcaggtggcccctggtatgcggggctccgccctcctgccaactcgggggtctgttctggagcctcagaagggcctacggcagggccctctgggggtctctggaggcattgcaagagtgcccgcgggtgccaggcttgcggagtgcaggcccgcacaggtccaggcagtgcacggcgagagaggcggcccagtgccaagcgcacggggcgctgcagcagcccgtacaggaaggggtgagccgcgaaggccgagtaggcgacccaggtgacagccgcttcggcttccgcggcccgcgctgcgggcgccaggcacgcgcagccataaggcagccagcaggctgcaaattggcccacggccagcgctggggccagggccgccttgcccccgggcaggcgaggccggagcggcggcaagatgaaagcggctatccagagagtccgagcggagtcgggacccgcgcgccggccgtgggggcctcagggcagcgcgacgcgccaccacgaagatgccgccgtaggcgccgagcagcaggagggcgggcagcgcgaaggccagcagggcccagagcggccggaagggcccgaggcccccagccaggaccgagcagcgagcaggagcagggggcggtgcgggcggcgggccgagcagggagagcgcgccccagcagttcccgccgcgggcccacacggcggtgagcacgagcacaggcg

SEQ ID NO: 35 - DNA, 4736 bp, Homo sapiens
  misc_feature 4682,4692,4720,4721: n=a,c,g, or t
tttttgggcattaagagttctttattttaccagaagggacaggcagtggggcagtgcaacatccaagccccagaccagacatgcagcatccacatgcaggaagagctacacaggctggggcagggccagggtggggagctgggaccactggacattcacagcacccctgccaagacgcttgggtcctgggctcttctgcctccattggagcaaggagacagaggattgggttgcttccccatggctggaaccccatcactctggccaggaagaaagatggcacaagggctctggggtctggccaggctacagcactcgattctgtacagggttggcacagccttgtccaccagaagggcccaacacccaggacagtgcagccctagcaggaagaaggtctacacacttttctgtccccaacagggctagaccctcatctcagaaaacttagcagagttgggaccaaaccgcaccgccccagcaggaacatgcccatgaagaggccttccctgagcacaagcaggggcctcctaaggcagtaggaaactgaggaagctgctgtagacaggaggccttgcctctgtgcccttggggtcagggagaaaggacagggtatgagcgctggctggggccttgggtggatgaggggaaggacagtgtctctgggccctgcaggtcatggctgcccagacctagaggggcagcagcaggtgaggctgtgggcttcctggggcagggtttagggctgggaagaccagtccaggagaaaggacagtgaccgtcctacccagaacccctgcccatgctgagctctggccagggccatagggaggatggacagatgcacagagaacttcaaggcaccaggattctgaggagcagcagggccaccccccacagagagtgattgtaataaacatcttcagcttaatctacatgatgtgcatgggggaaagaaaaagacagacaaaggaaaagacacgcagggagatgagacacaaacctgatgaaagtggcagtgaaagtggggtaaaggagaggaagaggaggaggtggacagacaggagagacaggaagacagccagagatggcctgaacacgcagcacttctggtcccttcgagataaggcaccagagtcagtaacgttcccgttgttctgtgggattaaaacgggtgctggagggagggccgggtggctgctgaagagagtgggcctgtaggagcctcacacctgcacaccagtggccttcttgatcaggggtatcttagacaggtccacgcctgtgagggcatgcacagaggcaggcagctcggccagcagtcggttcacttctgatgtgaccttactgttgtctccactgaggaccacaatctcatcgaccttggtaagtggggcagcgattttggcagcaatctggggcagggcctctagcaccaaggccatcttggctgcatccccgtatttctggtaggcttctgccttgagcttcatccgctcagcctctgccttgcccatcgcctcgatgactgccgcttccgcctccccgattttgcggatcttctcagcctctgcctgtgccaagaggacctgcttcaccttttcaccctcggcaatctgctggatgcggtgggcctcggcctcggcaggccggcgcactgtagcgatgagctccttgtccgtacgcaggatctcctgtgcctccacggcaatctgtttcttgcgctgcacaacctcaatctcaatctcttcctgccggatcttctgctgttcacgggccccctgcagctcataggccaactgggcctcagctgtcttgatgttaacctcctcactgaaggctgacttttgcagctcgaaggctcgcttagagtcagcaatcttggtgtctgccatgaacttcacatccagcatctccttcttgcactcagcttcccggatgcctgcgtcccgttcagcctcggccacgccaatgtcagcatctctctgcaccacggcagtctgcgtcttgcccagggagctcagatagtccactttgtcatacacgtccttgatggtgaagctgaggatctcaatgcccatgcggccaacatcaggggctgccacctcccgcaccagcttggcaaactggtcccggtcctgataaatctgctccactgtcagggtcccgaggatggagcgcagatgtccctccagggtctgcaggacgacgtttttgatgtcctgcacattcttacccagaaactgctcacaagccacggccaggagttccttctccgtcatgatcttcacctctgagtgtcggagatacaccaccaggcccaggcccagccgccaaacacgtactgtttatagtcggaaccacaacagccctaggcctctttggccgaattcggccaaagaggcctattttttttttttttttttttttttttttagatgctcgcttgtaaagtttattgacaactgtttggtcccaacacacaaaacagcacttgaaccacaacaaaagtgttcaaacaaagtagacaactaagaaaaacatctctttcccccaaacccaatccaaaacaaacagtgcaagatgggaaagggggttttggtgataacttttgtcatttttttaaacagataaatttaatccggtatatctttccacccagaaataaagaattacattgtcttaatgctcaaacatcattttaccacatcatttaattaagcctctggataaaaaaatagatagcaattggactggccattgtggagtacattatgaacacaatgtgcttccgaagtcttctctctcattttcagacagcaattgttaagagtcacacacacgtcccagacctaagcagcaactccagtgaatggtactcagacacactcacgggacagcacagaacttgattcttctttgtctgttgcccaaagaacctgttctttgagtctgttccaggtgacttgtaatgatacctcttacggttttaaagtccaccactctttacatgctagcagaactgaagtccaagcgtgcaaactcagccttatgaaatcttagaataaggcaactgatgttctcaacaccaattattattactttgtttaaaagctcctttaaaaaaaattgcacatttgcatttcacttcctgtaacactatgtctgtagaggaaatgccttcaggaggattcggagagtgccataatacttacagggttttttccatggtgttctgtcttgactggggccatgtgttgagaactgggagtcactggcttcatttaaaagatttggggaacaaaaaatctgacttgtaaaaatctctctatagcccttattttgtggcattttatcaaaatgctatgaaatcagagtccattttctggctttctagaagttaccaaatataaacatttccccaaaagaaaccatctaactagtggaagaccttacgccaacaggttctttctgctctatgaatgaatccgccttttttgccggacaaatacaatccattgtaaatgtcaggtttctctagaggggggtgagaggccacccgtcagcggacacctcaggcacctagagaggaaggccattccacaccagacgccacaagaaacccagagatgcttccaacagcgagaagtaacaagagtaaaatcagacacgattaaaagatgctgagctgacatacacacacataaagcttcccagctaccgataccagctttaaaattacaataacaaggttaagtggatcaaccttggccttcctatgtgtaggtagaattcctgtctcttcccagtggaaatcgtattgatcccgctgctgctgaagcacctccccactcagctctgatttgtaatttatgcacttgatgcatattttagaaaatcaggctctttccaatgctgcctctcgacacacaataatgtgtgttgtaatccaaatgctgactttaaatccatgacatcgagaccatctccttttccttaacctaacccatatcaaactggaacacagaagggaagcttcaaacatcctcaactttctagaaagctcctaaatggaaccccaaagtagaaacgtttaaaaaaatttgtgatgaagccacttttgtcaactacagacatagtttaaataaaaaacaaggcacacttacaagtcacatggaagccaggaaccttcacattccaacctgaaaatacactccgaacccctcgcctacccttctcctttggtgtgtgaacacacaggctagcgggacaggctttgcttaaaagacatgccacgcactgggttaatactgtcggaaacaccagtaagcaaaggctgagagactctattatgctacatgtaggatgacaccaccgacgtggctcaatggaagcaaaaccgcttcctgctagttgagtttttagtgctttcttcttttggaacaccattgtatttcataatagttactaaaaatttggtaaaatatattaaggattctttaacaaatgccacaagttcttcaaataattgaaaaaagaaagaaaaaggaagaagaaaagaaagacttcagctcaaagctgtgttcaatggaaaagaaaaacatgatagaccacaggtaagatgaagtcaatggcttcggggggttttcatgacacagaaaaggatgtatttttgaaacccncttttgtgtncagaatcagacagtgttttcccatcctnnttctatattccaaat

SEQ ID NO: 36 - DNA, 2740 bp, Homo sapiens
tgcccaagagcaagggcaacccggcggcttacggcatcaccgtcaccaaccaccccatgaataagaccagcgccagcctctccctggattacctgctgcagggcacggatgtcgtcatcgccatcttcatcatcgtggccatgtccttcgtgccggccagcttcgttgtcttcctcgtggccgagaagtccaccaaggccaagcatctgcagtttgtcagcggctgcaaccccatcatctactggctggcgaactacgtgtgggacatgctcaactacctggtccccgctacctgctgtgtcatcatcctgtttgtgttcgacctgccggcctacacgtcgcccaccaacttccctgccgtcctctccctcttcctgctctatgggtggtccatcacgcccatcatgtacccggcctccttctggttcgaggtccccagctccgcctacgtgttcctcattgtcatcaatctcttcatcggcatcaccgccaccgtggccaccttcctgctacagctcttcgagcacgacaaggacctgaaggttgtcaacagttacctgaaaagctgcttcctcattttccccaactacaacctgggccacgggctcatggagatggcctacaacgagtacatcaacgagtactacgccaagattggccagtttgacaagatgaagtccccgttcgagtgggacattgtcacccgcggactggtggccatggcggttgagggcgtcgtgggcttcctcctgaccatcatgtgccagtacaacttcctgcggcggccacagcgcatgcctgtgtctaccaagcctgtggaggatgatgtggacgtggccagtgagcggcagcgagtgctccggggagacgccgacaatgacatggtcaagattgagaacctgaccaaggtctacaagtcccggaagattggccgtatcctggccgttgaccgcctgtgcctgggtgtgcgtcctggcgagtgcttcgggctcctgggcgtcaacggtgcgggcaagaccagcaccttcaagatgctgaccggcgacgagagcacgacggggggcgaggccttcgtcaatggacacagcgtgctgaaggagctgctccaggtgcagcagagcctcggctactgcccgcagtgtgacgcgctgttcgacgagctcacggcccgggagcacctgcagctgtacacgcggctgcgtgggatctcctggaaggacgaggcccgggtggtgaagtgggctctggagaagctggagctgaccaagtacgcagacaagccggctggcacctacagcggcggcaacaagcggaagctctccacggccatcgccctcattgggtacccagccttcatcttcctggacgagcccaccacaggcatggaccccaaggcccggcgcttcctctggaacctcatcctcgacctcatcaagacagggcgttcagtggtgctgacatcacacagcatggaggagtgcgaggcgctgtgcacgcggctggccatcatggtgaacggtcgcctgcggtgcctgggcagcatccagcacctgaagaaccggtttggagatggctacatgatcacggtgcggaccaagagcagccagagtgtgaaggacgtggtgcggttcttcaaccgcaacttcccggaagccatgctcaaggagcggcaccacacaaaggtgcagtaccagctcaagtcggagcacatctcgctggcccaggtgttcagcaagatggagcaggtgtctggcgtgctgggcatcgaggactactcggtcagccagaccacactggacaatgtgttcgtgaactttgccaagaagcagagtgacaacctggagcagcaggagacggagccgccatccgcactgcagtcccctctcggctgcttgctcagcctgctccggccccggtctgcccccacggagctccgggcacttgtggcagacgagcccgaggacctggacacggaggacgagggcctcatcagcttcgaggaggagcgggcccagctgtccttcaacacggacacgctctgctgaccacccagagctgggccagggaggacacgctccactgaccacccagagctgggccagggactcaacaatggggacagaagtcccccagtgcctgccagggcctggagtggaggttcaggaccaaggggcttctggtcctccagcccctgtactcggccatgccctgcggtcactgcggttgccgcccctaattgtgccaaaggttgacccggcccgggctgcgtacacccttgccctgctttgccttaaagcctcggggtctgcccggcccctcgcccatgcctggcactgctcaccgcccaaggcgacgccggctggaccaggcactgctggcctttctcctgcccggcctcggaaccagcttttctctcttacgatgaaggctgatgccgagagcgggctgtgggcggagctgggtcagtcccgtatttattttgctttgagaagaggctcctctggccctgctctcctgcagggaggtggctgtcccgcgggaagccatcagcttgggccagctggcaggtggcaggaatggagaagctgaccctgctggccaggcaaggggccagaccccccccaacccccagctgccatcgctctcccacccagcttggccccctgcccgcccacctccctgggagccgggcctgtacatagcgcacagatgtttgttttaaataaataaacaaaatgtc

SEQ ID NO: 37 - DNA, 1928 bp, Homo sapiens
agcatgcctggctgagagcttgaaacagagttctgcagaaaaactgtaaagatcccgagacatttccctgactcttgagatactgactggaagatagactgttttgttccacctgattgtatgggagaaatttttgaccttagaaagtggaaatgaggttgctatggaaactggtaattctgctgccactcataaactcttctgcaggtgatggtcttttaagccgtcctatttttactcaggagccacatgatgtcatttttcctttggatttatcaaaatctgaggtcatcctgaattgtgctgctaacggttacccttcgcctcattataggtggaagcaaaatggcacagacattgattttactatgagttatcactacaggttggatggaggcagtcttgcaatcaatagcccccacacagatcaagatattggcatgtaccagtgcctggccaccaatcttctggggacaattctgagtcggaaggcaaagctccaatttgcatatattgaagactttgaaactaaaacaagaagcacagtatctgtccgagaaggtcaaggtgtggtgcttctctgtggcccaccgccacattttggaggtatgatggggtgatttgggtcatatcatcaatgcggtcacttggagagtgatgtgagcacatcaggtcttaggctcaatgatcaccttttatcaaatcaaagaaattgtgactctcgtcaagtgcatctactgcatacaaatagttctatatctaaacattttcttttaaaaatattcgttcaagcagccacacagcaaatatgtttttaaggagatacatcagggcattgtacgtagtgtgagtgccagggctttttagagaaactgaccgcagctgtaattcggtgctgtgacaggcaaacttcatgacaaggggacaatttatttaccccactttgaggcttggttttctcatctataaaatagagacattaactgtttgtttgtttgtttgttcagttttgttgtaaatgttaaatgagctaataaatgtaaattgagtagtgtaataactaatactttagtaagtaaagaaagttaagattgttactacgtttttatttttgggctctatggagaagcaaattccaactaacactcctcttggcaatgtcacattaattactggaagggatagatcaccattaactggaagcaaattctgtatagcaccaaatcaggatgtctcctggcaatggtaaaaatcaagcaataaatgccagcctctactttggaagactctggcttggtcagtggactggcccgttgtcagggatccaaactacttactgattctcatcctcttgggaatggattttctcaaatttcacatgatgtggtaaatttagtcgtgattctcaactcacagtgaacctgaaggaggcagtgtgaaaacatccatggagtcatttggtacaaaccaatatcacactaactatattatagaaagcttaataacagcaaggacttacacagcacagacccaaggactttaacatgtattagattcttaaattttcacaaaaacttataagagatatatgagtataattattgttttacaggctcagtacactatagagaaatagaaagatgttaattaactggtccaaggtcacgcagctggcaggcaatgaagccaatattcaaatccaggaagtctggttcccagaccctcagctcttaactatcactgcagttgttataattgatttccactctggaatgggagaacttttaaaatacaaaggacagatgtttaaaaataaaatttaagcaatttacttttaatgttaaaccaaatcttatttatgagccttgagaaacttgaaagcgtttttccattattatttttacacaacctcatgaattgccatgacc

SEQ ID NO: 38 - DNA, 2278 bp, Homo sapiens
ttttttttttttttttttttttttgtctcaactcttttaatttctttttttaaagagtctcacgctgtcaccaggctggagtgcagtggcgtgatctcggctcactgcaacctccacctcctgttttcaagcgattctcctgcctcagcctcctgagtagctaagacaacaggcgcgcgccaccacacccggctaatttttgtatttttagtagagatggggtttcaccacgttggccaggctggtctcgatctcttgacctcatgatctgcctgcctcagcctcccaaagtgctgggattacaggtgtgagccaccgtgcccgggcctgtaatttcatttttaaatagttaagagcttgcccgtatttttaggacctatgatctgaagatgttttttctttccctaaacagggaaacgtcctctctgtagttactgagaggaaggtgaggacctcaggctcccagtgtaactcctgctgaaaaaccttatacttgacacagttcatttctggtcatacaaagtcctgctgtagttcttcacttgttttactttcgctttcatcttcattagaataatttcctgaatcttggctagtttgggaactgtattttttatgatcttcatcagtttgattagtttcttctactgtagcaattgtgcttatattttcaattatgaaacatttttcgatttgttcctcagaagttgaaagcagaagattcttcaatggctgttcagagaaatactcatctatactggaagaaggtttaagtgatggaaagaagacataattgatgcatctcaagaagactttcgcagcataaatgacaaacgggagagcaaataatgcaatacaaattccaactataagccaaattttagaggtatttcctggttttgttttctcacatacagcgtcactaaaaacactgcttttattcagcttttcatccatggtgtgtgctctggctttcacacaatatacagtcagtggtttcaaattaggaactgtaacatcagtttttttctcgataatttttctctcagcatttgaagtgttttcccaaaaaataatttcataaatcagtggataatcctggatcacaggcgtgtttccagactgttttggagcaccgatatagatatggaatgaatcactaagggatctaatgttaaagactggaggaagtaggaaagcttgtatttcagtatcaaactttatctcttcagaccaaaaagatgtgttatttccatcagatgcttgtacgcggagaaggtaaattcctttttggaaaacgttttgaggaaagacacactgggtagttttgacattttcacagtcaggtatttgtttccatttatacaaatggtttccaggattcctttttaaaaaggcgtggagccactgaacttgaaaggtcatgtttgcatatgtataatcccatttaagaacatagttctgattttggacactgacttctatattttctggtggaggtagttcattttcaactgtggtctttatacaatgtactggactatagacaccaattttccatgacgtaagtagtgctgctttaacttttagacaataagtagtctctggtgagagtttataaattttatgtctggaataaatattttcaatcctttcttctacacctgaagagtttttccagataactaagctatatgtaaagcttaaaccatccaaagcccacataacactatcttttgttccaggagagatgtgtatcactattgccttatcttcagcttctaaatgtacttctggaggaccaatctgagctttgcgaaatggtgtaaatgagtcaacctcataccatgaagaagtgttttctttttctgctcttatacgcaatttaatttcttcataaacattcagcttgagtgaagaaaagttgcatttggtactagtaatattctgacacccagacaattttatccaattatccatcccagttttttgataatcgaatgaaaaagtcacattcccgacagactcatcgctcctgttccacctcaggataaagttgtcatctatgatgtcgacctctactttttgaggagattttagattttttccacctgcggctgcggacaacacccatggcgccacggcgacgagcactagggtcgtcgcgcccaggaggacgaccatcatctgggagccgccgcagatcccaccagttacatgttcgcgcacgcgcagctcctctcagccgccatcgccccgtcctaaggaaccttagaaa

SEQ ID NO: 39 - DNA, 2732 bp, Homo sapiens
gatggtgtttggaggcgtctgtccatccgtcacatccatcattgcagagtccctccaaggctggaatctggtgcagctttcttttgctgcaaccacgcctgttctagccgataagaaaaaatacccttatttctttcggaccgtcccatcagacaatgcggtgaatccagccattctgaagttgctcaagcactaccagtggaagcgcgtgggcacgctgacccaagacgttcagaggttctctgaggtgcggaatgacctgactggagttctgtatggcgaggacattgagatttcagacaccgagagcttctccaacgatccctgtaccagtgtcaaaaagctgaaggggaatgatgtgcggatcatccttggccagtttgaccagaatatggcagcaaaagtgttctgttgtgcatacgaggagaacatgtatggtagtaaatatcagtggatcattccgggctggtacgagccttcttggtgggagcaggtgcacacggaagccaactcatcccgctgcctccggaagaatctgcttgctgccatggagggctacattggcgtggatttcgagcccctgagctccaagcagatcaagaccatctcaggaaagactccacagcagtatgagagagagtacaacaacaagcggtcaggcgtggggcccagcaagttccacgggtacgcctacgatggcatctgggtcatcgccaagacactgcagagggccatggagacactgcatgccagcagccggcaccagcggatccaggacttcaactacacggaccacacgctgggcaggatcatcctcaatgccatgaacgagaccaacttcttcggggtcacgggtcaagttgtattccggaatggggagagaatggggaccattaaatttactcaatttcaagacagcagggaggtgaaggtgggagagtacaacgctgtggccgacacactggagatcatcaatgacaccatcaggttccaaggatccgaaccaccaaaagacaagaccatcatcctggagcagctgcggaagatctccctacctctctacagcatcctctctgccctgaccatcctggggatgatcatggccagtgcttttctcttcttcaacatcaagaaccggaatcagaagctcataaagatgtcgagtccatacatgaacaaccttatcatccttggagggatgctctcctatgcttccatatttctctttggccttgatggatcctttgtctctgaaaagacctttgaaacactttgcaccgtcaggacctggattctcaccgtgggctacacgaccgcttttggggccatgtttgcaaagacctggagagtccacgccatcttcaaaaatgtgaaaatgaagaagaagatcatcaaggaccagaaactgcttgtgatcgtggggggcatgctgctgatcgacctgtgtatcctgatctgctggcaggctgtggaccccctgcgaaggacagtggagaagtacagcatggagccggacccagcaggacgggatatctccatccgccctctcctggagcactgtgagaacacccatatgaccatctggcttggcatcgtctatgcctacaagggacttctcatgttgttcggttgtttcttagcttgggagacccgcaacgtcagcatccccgcactcaacgacagcaagtacatcgggatgagtgtctacaacgtggggatcatgtgcatcatcggggccgctgtctccttcctgacccgggaccagcccaatgtgcagttctgcatcgtggctctggtcatcatcttctgcagcaccatcaccctctgcctggtattcgtgccgaagctcatcaccctgagaacaaacccagatgcagcaacgcagaacaggcgattccagttcactcagaatcagaagaaagaagattctaaaacgtccacctcggtcaccagtgtgaaccaagccagcacatcccgcctggagggcctacagtcagaaaaccatcgcctgcgaatgaagatcacagagctggataaagacttggaagaggtcaccatgcagctgcaggacacaccagaaaagaccacctacattaaacagaaccactaccaagagctcaatgacatcctcaacctgggaaacttcactgagagcacagatggaggaaaggccattttaaaaaatcacctcgatcaaaatccccagctacagtggaacacaacagagccctctcgaacatgcaaagatcctatagaagatataaactctccagaacacatccagcgtcggctgtccctccagctccccatcctccaccacgcctacctcccatccatcggaggcgtggacgccagctgtgtcagcccctgcgtcagccccaccgccagcccccgccacagacatgtgccaccctccttccgagtcatggtctcgggcctgtaagggtgggaggcctgggcccggggcctcccccgtgacagaaccacactgggcagaggggtctgctgcagaaacactgtcggctctggctgcggagaagctgggcaccatggctggcctctcaggaccactcggatggcactcaggtggacaggacggggcagggggagacttggcacctgacctcgagccttatttgtgaagtccttatttcttcacaaagaagaggaacggaaatgggacgtcttccttaacatctgcaaacaaggaggcgctgggatatcaaacttgc

SEQ ID NO: 40 - DNA, 2201 bp, Homo sapiens
tttaacatatctgaacacacaatagctaagacccaaactgggattagataccccactatgcttagccctaaacctcaacagttaaatcaacaaaactgctcgccagaacactacgagccacagcttaaaactcaaaggacctggcggtgcttcatatccctctagaggagcctgttctgtaatcgataaaccccgatcaacctcaccacctcttgctcagcctatataccgccatcttcagcaaaccctgatgaaggctacaaagtaagcgcaagtacccacgtaaagacgttaggtcaaggtgtagcccatgaggtggcaagaaatgggctacattttctaccccagaaaactacgatagcccttatgaaacttaagggtcgaaggtggatttagcagtaaactgagagtagagtgcttagttgaacagggccctgaagcgcgtacacaccgcccgtcaccctcctcaagtatacttcaaaggacatttaactaaaacccctacgcatttatatagaggagacaagtcgtaacatggtaagtgtactggaaagtgcacttggacgaaccagagtgtagcttaacacaaagcacccaacttacacttaggagatttcaacttaacttgaccgctctgagctaaacctagccccaaacccactccaccttactaccagacaaccttagccaaaccatttacccaaataaagtataggcgatagaaattgaaacctggcgcaatagatatagtaccgcaagggaaagatgaaaaattataaccaagcataatatagcaaggactaacccctataccttctgcataatgaattaactagaaataactttgcaaggagagccaaagctaagacccccgaaaccagacgagctacctaagaacagctaaaagagcacacccgtctatgtagcaaaatagtgggaagatttataggtagaggcgacaaacctaccgagcctggtgatagctggttgtccaagatagaatcttagttcaactttaaatttgcccacagaaccctctaaatccccttgtaaatttaactgttagtccaaagaggaacagctctttggacactaggaaaaaaccttgtagagagagtaaaaaatttaacacccatagtaggcctaaaagcagccaccaattaagaaagcgttcaagctcaacacccactacctaaaaaatcccaaacatataactgaactcctcatacccaattggaccaatctatcaccctatagaagaactaatgttagtataagtaacatgaaaacattctcctccgcataagcctgcgtcagattaaaacactgaactgacaattaacagcccaatatctacaatcaaccaacaagtcattattaccctcactgtcaacccaacacaggcatgctcataaggaaaggttaaaaaaagtaaaaggaactcggcaaatcttaccccgcctgtttaccaaaaacatcacctctagcatcaccagtattagaggcaccgcctgcccagtgacacatgtttaacggccgcggtaccctaaccgtgcaaaggtagcataatcacttgttccttaaatagggacctgtatgaatggctccacgagggttcagctgtctcttacttttaaccagtgaaattgacctgcccgtgaagaggcgggcataacacagcaagacgagaagaccctatggagctttaatttattaatgcaaacagtacctaacaaacccacaggtcctaaactaccaaacctgcattaaaaatttcggttggggcgacctcggagcagaacccaacctccgagcagtacatgctaagacttcaccagtcaaagcgaactactatactcaattgatccaataacttgaccaacggaacaagttaccctagggataacagcgcaatcctattctagagtccatatcaacaatagggtttacgacctcgatgttggatcaggacatcccgatggtgcagccgctattaaaggttcgtttgttcaacgattaaagtcctacgtgatctgagttcagaccggagtaatccaggtcggtttctatctacttcaaattcctccctgtacgaaaggacaagagaaataaggcctacttcacaaagcgccttcccccgtaaatgatatcatctcaacttagtattatacccacacccacccaagaacagggtttgttat

SEQ ID NO: 41 - DNA, 1727 bp, Homo sapiens
atgaattttgactcttggggactgggctgaggacggggtggtactgctcctggcagggccagaggtggatggggcttgaaaagggggttcaaggcagcagatctatggttcagacgccatggagttggtgctggtcttcctctgcagcctgctggcccccatggtcctggccagtgcagctgaaaaggagaaggaaatggacccttttcattatgattaccagaccctgaggattgggggactggtgttcgctgtggtcctcttctcggttgggatcctccttatcctaagtcgcaggtgcaagtgcagtttcaatcagaagccccgggccccaggagatgaggaagcccaggtggagaacctcatcaccgccaatgcaacagagccccagaaagcagagaactgaagtgcagccatcaggtggaagcctctggaacctgaggcggctgcttgaacctttggatgcaaatgtcgatgcttaagaaaaccggccacttcagcaacagccctttccccaggagaagccaagaacttgtgtgtcccccaccctatcccctctaacaccattcctccacctgatgatgcaactaacacttgcctccccactgcagcctgcggtcctgcccacctcccgtgatgtgtgtgtgtgtgtgtgtgtgtgtgactgtgtgtgtttgctaactgtggtctttgtggctacttgtttgtggatggtattgtgtttgttagtgaactgtggactcgctttcccaggcaggggctgagccacatggccatctgctcctccctgcccccgtggccctccatcaccttctgctcctaggaggctgcttgttgcccgagaccagccccctcccctgatttagggatgcgtagggtaagagcacgggcagtggtcttcagtcgtcttgggacctgggaaggtttgcagcactttgtcatcattcttcatggactcctttcactcctttaacaaaaaccttgcttccttatcccacctgatcccagtctgaaggtctcttagcaactggagatacaaagcaaggagctggtgagcccagcgttgacgtcaggcaggctatgcccttccgtggttaatttcttcccaggggcttccacgaggagtccccatctgccccgccccttcacagagcgcccggggattccaggcccagggcttctactctgcccctggggaatgtgtcccctgcatatcttctcagcaataactccatgggctctgggaccctaccccttccaaccttccctgcttctgagacttcaatctacagcccagctcatccagatgcagactacagtccctgcaattgggtctctggcaggcaatagttgaaggactcctgttccgttggggccagcacaccgggatggatggagggagagcagaggcctttgcttctctgcctacgtccccttagatgggcagcagaggcaactcccgcatcctttgctctgcctgtcggtggtcagagcggtgagcgaggtgggttggagactcagcaggctccgtgcagcccttgggaacagtgagaggttgaaggtcataacgagagtgggaactcaacccagatcccgcccctcctgtcctctgtgttcccgcggaaaccaaccaaaccgtgcgctgtgacccattgctgttctctgtatcgtgatctatcctcaacaacaacagaaaaaaggaataaaatatcctttgtttcctagtg

SEQ ID NO: 42 - DNA, 1749 bp, Homo sapiens
ggccgcttttttttttttttttttttttttttttttcttttttttttttttttttttttttttttttttgattgaaaagattcttaattttattttctttaattttataaaatacactttgtaagataagtttctaaaagtttatcctttatgtgtgttaaaattgcaattctatatcagaaatgaaggaaacactttcagttgattaactccctttgtgtgtgtatatatgtgtatgtatgcatgtgaggttttcagggaagggttggttatttgttatgttattaaatcaaaacaaaacacaaggtacggattacttcactgtcctttatcttgattggtttcttacaaaacattttccctctcctccttctatgcagcctggaagcttatcttgtatactggtttgaaaacaagtatcaagtgtctttttgtaaagctcttacatctccttaaatattgctgaaaccactttgggggaaaacaacaacacaactctttacaacaaaagaactgtagtacaaatctttccttcaattaaaaccaatcagacttttttttttttttaacccaaagttaacaaaaacaggaaaagactgaaatctgggagctattcaggtctcaaactctttctgcctgtcctttttcctggaagcttaccaactgaatagctgatgactggtgcattctgttatgtgatctatatcaggagaaaataacctttatgttaaacctaactcttaacacaccaagataacattgctaagtaaaatcattttccattagctagaaagaacgatcagattactcaaattgagattcaaattcaccaaatctgtttctgcaaaggcagaatacttgtagaaaatcccaatagattcaactagccaatttttaatatcatttgtgatgcttaatgtccaattttcctagtttaaaaaacagtcataatcaaagaattattctccagacatttctgatgcaaccccaaataagtaataaacaaactggaatacatgaaatgtgcatcattctaaaacaaatcaagaccttcaaatcacctacgatgactgaatggataataccccatgaaatgagcaccattgtgaagatatgacagaggccagagtacacaactaattaacagaaaaaaagacatgctatccaaagagttatctatcctgtgtctaccagagggccatctcaggttacaccattagccaccagcaactgctgctcctcaggccagtctgttctcatgtaagctagtttccttctattctcagctccttggaaaccacagggttgtcatggtagctgttatcaaggagaagggagtgagaagatgctgacaacaccctgtttctcttccctaacgaggtgtaaggccagatgcccccttcgtctacacagattctacgctcccttatgctgtaagtaaggttggctgagttagggcttcagtagtccatcgccatcggggtcagtgctctctttctgtgggtgaaagatccttgctttgacccccttctcccagctgcaataggcagatttgggcaaacgctcttattgtttttctgacattcttttttcttctatcttcagtggtaatagagagaccagaatgaattccattttgtacaccaaagagaatatatttggcccctatagatggcaagaggaccaaagacattccttctctgtacctgagcatctttccttccactttgtttccatcagtggaagaaa

SEQ ID NO: 43 - DNA, 1740 bp, Homo sapiens
tcctgttaaaacaaggaggtattcgggtaccgacggaaaatatgttaccgtattcagggcagtggaagaacactgtccttggtttcctgaaaaaggaaccttaagtgtagaacaatgggatagtgttggtgcaaaattccaggaactggtccctacagggaattatgttcccatcactgtgtggggtgattgggccttggtacgtgccatcctgatgacatagcaatcccgtgaccccctgcagttactacagttttctgaatctggagaccctctacctcttcctcagctttcttctcccacggggccttcgttatctgatcagcctctcccttcgcctactcctcccccacctgatgatgttgagaattcaatatctaattctggtgactttggcttaacattaccccctggtgatcttattttatttcccgaagagccgctacttgcagcttccgcggccccgaataggacagccctgggccatatatatgctaattcttccctcttcaaacctttgcagcatttgcctctggagtcagctaatggctccggggccaaactacaattcacctataattctgcaggcccttccccgtcctctgcagcccctcgccctcctgtcgtttcagttcctcaaccggtcactttgccatccactcaggctgcttctctgtacccttcttcacacatggataccagtaatcaccagtgcacttctgcctcttctgctcccccaatgcccctttctcacactctcataccggtccgacctcctcaaccttagtttcccttatctacacatgcttttcctgtcacttctatgctgactccgtctcaggtgcctactcttgaaacttcaatgcaactcttattacgccaacacaaggaaacaagtggattagaggcatgggcttgtccggtcacgctagaacctcataatgctcaaggtgtacaaatgcgtcgctatgcgccgctcaatcttacctttttaaaagaattcaaggatgcttgtactcagtatggtcctacttctccttgtgttaaaatggtattacagactttttgtactgaggtcattttgcttcctttagactgggaccttttggcaaaagctgttctaaccccatctcagcatttacaattccgtacctggtggtcagaggaggcccgtctgcaggctcagctaaatcgggctgatggcattctaattactcaggctcagctcacaggctccgatgacttctctgatatttatgcccaattacgctttgatgctgttaccacggaacaagtaacaaaggtgtgtatgagagcttgggataaattacgcaccccaggccaagctcctactgttaaacaaggtcacaatgaattataccctgattttttagctaaattacaagacggggttgaaaaatctgtctcggatgagcatgctcaagaaattctccctcgtatgttagcttttgagaatgcgaaccatgagtgtaaaatggccatgcgttccgtccagcaacaaaatgtacctgatcaggaggtgttgcctgcatatattaaagcttgtgaagacattggatcagagacccacaaagccgttctgtgggcatgggccataaaggacagcaatcaaactggctcgactgatcctttctttcaaggtactttggtaggatgattgtggtcatctgagttctctgatttatgtatgctttatctctatctagcagaaattacctc

SEQ ID NO: 44 - DNA, 2454 bp, Homo sapiens
agcagcatgttctgggaacctgggtaacggaatgattatgtttagggttgtttcactgaggaggttacatgaccgtgttttaaaaggatcagtcagttttaaatcgggaaggacatctgagcctgagaacatcttgtaacaaggtattgaatcgtgaaaggtgtgtttgagtagtagtccactgtagcaggaacagagggtgcaagtagagaagaaataaatgaatctggaaaggttggattaggaccagaatgtgaatggctttgaatagttgggtcacccagaggacctgaagtccagctttctgctatttatcaaacatgctaatgaattgtcaatgactttaatattagtataccattttaggtatttaggatttaaatgctctcttagtattcctaggctttattattttgtctttagactatctcaaatataaccttttgcaaagtaagtagaaaatataaagttgtgctgtttttgttcattcaggatgttattcatttggggatattgatagtatagctttgatacttatttattggtaacttcagtataagatgccctcagacaggaaaatcagaattctgatcagttttcctgaattttttagaaacccagctaaaaactttggtctattgctattcattggccaaacttgttatttttgagattattctatcaatgtgaattaagtgataccataagaaaatagcagaacattcaatacttgagcactgtctgtgcccatccctatgggatatgtcaggggatgataaatgtttagtagaaatacacataatactgacatagcttgttgcttccttcctaatggaactctagttcttcatggtccatcactgttttctcttgttaagccatttttgataaactgaagcagaattaatgctttttggggcagtgctgctatagtactcagtataaatgttatattgcttagaatagtctgttgtgttaagattttctcttctccttagctccaagattgagataaactgataactatttttttattttgctgtcatattcctttcaaacatttctttttttattttttatttttttttgagatagggtctttttctgttgcccaggcagaagtgcagtggtgcagtctcggctcacagcaacctccgccttttgggttcaggcgattgtcctgcttcagcctcctgagtactggtatcgcaggcatgtgccaccacacccgactaatttttgtatttttggagacagggtttcgccatgttggccaggctggtctcaaactcctgaccacaagtgatcctcccaccttggcctcccaaagtgctgggattactggcgtgagccaccatgcctgaaccctttcaaacatttctattaggatcaggcctcacatcctctttaaccaatctgattatattttaccctggccaatgtggcttatgctttccaggattgaaatataaaaagaactggaattactcaaatcagataaaatcttttagatctttccacgtattatgtcaggtgtatggttatgaatatgcataatcttgccatccagcagttcttcagatactgctgactttggcatacaaacagggaacacacattattctctgttttgtaaggggaaaatggtttaaccaaaaatcctacatatcagcttgttttgccactaatcctttgaattagattttttgggacatcacaaagctgaaaaagttttttccctaattctttgcttgataaatggctggaatagttatagttttgttattgtgtatcttgctgatctatatattttttcctgtgtttatttttgagaccgggtcttgccctgttgcccaggttggagtgcagtggcgtgatcatagctcacttaacctacaactgctgggctcaagtgatcctcccatttcagcctcctgagtagctacaactacaggcgtgtgctaccatgcctggctaatttttacaatttttttttagagatggggtctcgctatgttacccaggctgatctcgaactcctgggctcaagcagtcctgccttggcctcccaccgtgctaggattacaggtgtgagccacgatgcctggccttgaaatttttttttaatagaattaatcatttaggaatcaatttatcagtattgtttgtagtgttcagtaaaatgatttatattatagttagttgtcctattggagttttgtttaatgaaaaagctgagggttgggattcagaatatacttcctgtttttctgtgatgtcttttagaagccttgtattttggaaatagttgttcaccggttatatctggctgaaggagagtagatatcacttagggaccagactgaaaggtgtaggtgagacattaacatctgagggcagtatctgtgtaacatgtaatgagcagtgattagaacactgaaaataattcagacg

SEQ ID NO: 45 - DNA, 2270 bp, Homo sapiens
  misc_feature 2231,2232: n=a,c,g, or t
ataccttcaacccaatccagcttccagagctaagctcagcatgatcaacaccatgtcaaaaatccgtggccaggagaaggggccaggctatcctcaggcagaggcgctgctggcagaggccatgctcaaatttggaagagagcttggagatgattgcaactttggcccagcacttggtgaggtcggggaggccatgcgggaactgtcggaggtcaaagactctttggacatagaagtgaagcagaacttcattgaccctcttcagaatcttcatgacaaagatcttagggaaattcaacatcatctaaagaagttggagggtcgacgcctggattttgattataagaagaaacgacaaggcaagattccggatgaagagcttcgtcaagctctagagaaatttgatgagtctaaggaaattgctgagtcaagcatgttcaatctcttggagatggatattgaacaagtgagccagctctctgcacttgtgcaagctcagctggagtaccacaagcaggcagtccagatcctgcagcaagtcacggtcagactggaagaaagaataagacaggcttcatctcagcctagaagggaatatcaacctaaaccacgaatgagcctggagtttccaactggagacagtactcagcccaatgggggtctctcccacacaggcactcccaaaccttcaggtgtccaaatggatcagccctgctgccgagctctgtacgactttgaacctgaaaatgaaggggagttgggatttaaagagggcgatatcatcacactcactaaccaaattgatgagaactggtatgaggggatgctgcatggccattcaggcttcttccccatcaattatgtggaaattctggttgccctgccccattaggatgttatgctggctggctcgcctcctcttgacccagatagttacggttaaccactgctttggcaatgctgcttataacacatcccaagtgcaggccgcagtggtccacgtcatccagccccaccaagtgactttggttgacttgtgggctcccacaggagtcatggtgatggatgatatcctcttagcctggtgggcgtggcatgtgctttttaaaacatcatctgagaccagccagtagtcacagaactgctgtttacacagttctcaggaggctgtggtttcttagaatatgaccatgagccatttcacagaaaaaccatcccaccgaagatattgtctatcaccccaggggccatctgaaggtctctttgcatttctccatgcaaagaggagaaagcttttgctttcacactgtcccttcccaaatatgtgagtcatggaattgtcaaagtaagccttccctcaccagcaaattgtctcctgatctgaatgaatttgtctcttaatgcatccatagaaaagtgttaattgtgggttcaaagcattctctgcaaataggcatctcagctcctcacacttatggctatttctgacgtatagccagttttcttccctccttgctattaaagccagagcggtaattccaaattatttttcagtaagacagttaatcagcattattgtgagagggactgaaaagaaattctccattatgaggaattgggaagaaatctggtatccaagcttaaatttcttgctatacagaaactatgtatgtatttaggctatttctgaagggcacagggaagggggaacaaatatcttcacttcagttttatttgtgaattacatgtttcatgaatccatttggcacagagacacaaggaagaaaacactagtaaccatctttccactagttcatagactgagaaacagtaaatacctttcctttccacttttaccctgtgttctttgaacatcatttgtgcagattctgccctcaatgaggaccaaataaagatgatttttgtgcttagcagtttaaggtatatggctgcatatgcaaaactctttcccaattcagtcgctacttttacttctgccctttctatccatcgtcttcattttgtgtgtacagtgctgtgtgtaagcttatcagtgtgtttttttatttgtatcagtcatgaaagtcctgttaggtatccagagttctatttatctagctgtacagactctttcagaggtttaacgtgctgcttccgatgtgccacctgcagtcgtggatcatgtggagtgaaaggcaaatcttactgcttaatgtataaactctccccannaggaagcatcgctgtttccaataaatattgctgaagac

SEQ ID NO: 46 - DNA, 1482 bp, Homo sapiens
agctctcactgcggggaccctgctacttctgacagccatcggggcggcatcctgggccattgtggctgttctcctcaggagtgaccaggagccgctgtacccagtgcaggtcagctctgcggacgctcggctcatggtctttgacaagacggaagggacgtggcggctgctgtgctcctcgcgctccaacgccagggtagccggactcagctgcgaggagatgggcttcctcagggcactgacccactccgagctggacgtgcgaacggcgggcgccaatggcacgtcgggcttcttctgtgtggacgaggggaggctgccccacacccagaggctgctggaggtcatctccgtgtgtgattgccccagaggccgtttcttggccgccatctgccaagactgtggccgcaggaagctgcccgtggaccgcatcgtgggaggccgggacaccagcttgggccggtggccgtggcaagtcagccttcgctatgatggagcacacctctgtgggggatccctgctctccggggactgggtgctgacagccgcccactgcttcccggagcggaaccgggtcctgtcccgatggcgagtgtttgccggtgccgtggcccaggcctctccccacggtctgcagctgggggtgcaggctgtggtctaccacgggggctatcttccctttcgggaccccaacagcgaggagaacagcaacgatattgccctggtccacctctccagtcccctgcccctcacagaatacatccagcctgtgtgcctcccagctgccggccaggccctggtggatggcaagatctgtaccgtgacgggctggggcaacacgcagtactatggccaacaggccggggtactccaggaggctcgagtccccataatcagcaatgatgtctgcaatggcgctgacttctatggaaaccagatcaagcccaagatgttctgtgctggctaccccgagggtggcattgatgcctgccagggcgacagcggtggtccctttgtgtgtgaggacagcatctctcggacgccacgttggcggctgtgtggcattgtgagttggggcactggctgtgccctggcccagaagccaggcgtctacaccaaagtcagtgacttccgggagtggatcttccaggccataaagactcactccgaagccagcggcatggtgacccagctctgaccggtggcttctcgctgcgcagcctccagggcccgaggtgatcccggtggtgggatccacgctgggccgaggatgggacgtttttcttcttgggcccggtccacaggtccaaggacaccctccctccagggtcctctcttccacagtggcgggcccactcagccccgagaccacccaacctcaccctcctgacccccatgtaaatattgttctgctgtctgggactcctgtctaggtgcccctgatgatgggatgctctttaaataataaagatggttttgatt

SEQ ID NO: 47 - DNA, 2588 bp, Homo sapiens
gtccctccgcgcaggcgggcggccccggagcgctggtgccggcagaggcggcgacggtggcgcccctcctcatcatgaacagaggcttctcccgaaaaagccacacattcctgccctagatcttcttccgcaagatgtcatcctcaggggccaaggacaagcctgagctgcagtttcccttccttcaggatgaggacacagtggccacgctgctagagtgcaagacgctcttcatcttgcgcggcctgccaggaagcggcaagtccacgctggcacgggtcatcgtggacaagtaccgtgatggcaccaagatggtgtcggctgacgcttacaagatcacccccggcgctcgaggagccttctccgaggagtacaagcggctcgatgaggacctggctgcctactgccgccgccgggacatcagaattcttgtgcttgatgacaccaaccacgaacgggaacggctggagcagctctttgaaatggccgaccagtaccagtaccaggtggtgctggtggagcccaagacggcgtggcggctggactgtgcccagctcaaggagaagaaccagtggcagctgtcggctgatgacctgaagaagctgaagcctgggctggagaaggacttcctgccgctctacttcggctggttcctgaccaagaagagctctgagaccctccgcaaagccggccaggtcttcctggaagagctggggaaccacaaggccttcaagaaggagctgcgacaattcgtccctggggatgagcccagggagaagatggacttggtcacctactttggaaagagacccccaggcgtgctgcattgcacaaccaagttttgtgactacgggaaggctcccggggcagaggagtacgctcaacaagatgtgttaaagaaatcttactccaaggccttcacgctgaccatctctgccctctttgtgacacccaagacgactggggcccgggtggagttaagcgagcagcaactgcagttgtggccgagtgatgtggacaagctgtcacccactgacaacctgccgcgggggagccgcgcccacatcaccctcggctgtgcagctgacgtagaggccgtgcagacgggccttgacctcttagagattctgcggcaggagaaggggggcagccgaggcgaggaggtgggcgagctaagccggggcaagctctattccttgggcaatgggcgctggatgctgaccctggccaagaacatggaggtcagggccatcttcacggggtactacgggaaaggcaaacctgtgcccacgcaaggtagccggaaggggggcgccttgcagtcctgcaccatcatatgagtgttctcaccaccacttatgcccctagaagggaaggggagagggaaacgtgccctctgtttgatccttgttttgtgacatttttttttttttttttttactcaaagttaacctacctgtaactttttaaaaacttgtaaaataactgaccctcccttcctgtccgccctcttcccctctaatgctcacgctcccaacacaaggtgggcagggaggcaccattcaggaacctggaccaaagctgacgaggctgggccaagccagggatggggccacagccagaaccccgagccctacttccaggttctggttagctcagccccagcccagcccagctgctctgcccagagctgggtgagtggggagacacctcagagccccgcaaaacccactgaccggaggcaaaaggcagtggggctgggggtagttttccatggtcacagagaactagtggtggctctgagaaggggaggacctctgggctttgattccatctccttgtcttttttctttgtttttagagacagggtcctgctatttcccaagctggagtgcagtggtgcgatcatggctcactgcagcctcgaactcctgggctcaagcaatcctcctgagtgatcccatttcttaatcagtgtagccccaagaaggctggggctatttaccagggtagaaaaaggagcttacctcccacctttggtcctaagtccctgccccctccccttcacaccataactaggtaacagtttgataactagggaagaaagcagaacagttaagcagccgccacatccccgctggctgggggcctcactccaggaaggggctggactggctgtcctttccagtggcctggctccgctgtgtggatggggagatcggggccagaggcagaaccctggtgaggaagctccagtcctgctctctacccagcccatcttgcctccatggtgcctctggaggcctctgggcctcctctaacaggggctggtgggcaccaagagccaatggagtagacccctggctggtaagggccaagtcccaccggttgcttctgggaaggggtttctaacactagtctgtgtgctgtggttcctggggtgccctccactgccctctgttcagtaacagggccttgctaatcgggttgtcactcaacaaaagtgctttggatttaagttactatcctggctttgcccaacctcagcaacctgtaagactgataatgaaataaatcatgttaatccc

SEQ ID NO: 48 - DNA, 2222 bp, Homo sapiens
tttttagccttaggcatggtttttattcacttgaacactgtacaaatattacaatttccttttgctgcaaaaagtataaaaataatctttatataggaatccattcgttactgtaaatctttctaaatctctgcaaatggctctaaatgagggtaaatgaaaaagccgaaatgaagagagggttatggggcagcaggaggtggggccaatcatcagggctggaccacccagactcctccccagagacctctgttccttcttggtagccgcccccaccacctgcaggttctagggctaaaggcccagcagaagtgggcacgtgagagggccaggaggagctggagggtcagggggtgggggatagcgaaggaagctagaagtggtgctggcatgtgcccagttccaccccacccttccctcctaggggaaggagctggcagaagcaagacactgaggctggcaggaacaagacactgccccctatgggggtaatggcagctcctcggttctgtgccactgggtggcagccgagcctgggctggcgaaggccgcagaaagggagaagcaaacactttggctccacggtgatgggggctgagtcctgttcccctgctctgcgagcacagaagtgccagcacaggagcgggagctgtggccagaactgtgcggtgagaggaggccggagaagccaggcgtctgtggctctcaagctctgtaggggtcgggtgggagaggtccccaggcaacccccaggtcagacagtctgggtcccagccacacagggcatgtccctgtcagtcagaggttgagaacaggcacatcaaagaggtcacagacaccttcactctcgtccaggttgtagatataatcgtggtctcccgggggtggagaaagacgaagcagatgggcaaacacttctgaggacatcaactcctccagcagctccgagctcatgcactctcgtgtgggatcaaagatttctgacagctctttggggagttccaaaacacctgtggggtctgccttgatgggctcaaaggaggtagaagggttgggtccggacgaactgctgctgttactgttgctgctgctgctgctgctgctgctgctgctgctgctgctgtccagcagggcagaagactgcagtggccgggtgtccagtgttgttgggcccagtgggagtgaactgagctcaccactgtccttgctatcagtcccagggccgccactcactgtgatctcagctgctgggccagccattccctggacttctgcactgccagggacagcagtgggagtgagctgaggactatttggacgtgaggcttcctgggactgggctagggcaggcttgggcagaggtggaggtgtagaaacagcagatgggctctggagcaaatcttcaggtggtggcacaggcacagccacagggggtgagctccatgcctccttgttcaccagcagaacctcaatgggaccactcacactcttcaggtgaatctggtacttcttctgcccattgagaccctctgggatgggcacctccaggctggtgcctgatggggcccggatggccaagagggtatctccagcaaagcatctgcagatgtcctcatgagtgacgtaggccaaacagctgttctgcacgtcctctgtgacgttccggatgctctgctgcacccacaccttgtgctggtctagttcttgctcccgctgctgcagctcctcgatctctgccttgagctcaatcagtttgtcagcaatctcccgggtattgcagccaggccccacacccctgagcccagggagtggggctgagagggactgctgagaactctgggtcccatggcccctgccttcttcggcaccctccaccccacgcccgacacttctgggtgggagactctactaccctcccactatgcccactcacttccactggatgctgttcttggactttttctcgattagcccgataccttccaaaacattggtaatgtcgtaaatccgccgcttctggcgtacagctagggtgtcagctgcctggcagagagaatggagaatgctcagccccactctggggtgtacccccagccaccctgagacgtggtctgggaagggagtaatctggattccaaccctgtagtgcctcccaggcgctactgcagctcaggaccgcagctctgtcccataggcagctcttctcctcgccagccaggaaa

SEQ ID NO: 49 - DNA, 2176 bp, Homo sapiens
ttttttttttttttttgccatttaacttgttttaatgtttcttcacaaatggtgaaaaatactaaagtacagacaaggaataatcataatgttgtggccaacattataaatatggaattataaatttaaaacattttctggtttaaaaaataaatctggtagtcaatgcagctctgcggggtctctgcatctagtagggccgatctctgcgctcctgacggtgctcgcctttatccatttttccaggtcctccacgtcctcctcttcttcctcccatctgttccatcaaaggtccagggggccccccagggccacctcgtcttcctccaccaaagccacctcggtccatgccccggccaccacggaagccacctctgtctccaccacggccacctctgaacattccaccgggaccaccacgatccatgaggccacctcttcctccccgcatgccaccagggccacctctgccacgatcaccacccgggggcggaaagggtggcgggaggaagccttcaggctttggggccttacactggttgcactctgttctccaggcgaagttctggtttccacaacccggattgggacactgccagtctccagctcggtgctggacgtttcctcctccagaggggttccctcgggaaccccggggtcctcttggagggaagcctcctctatctcctccacggcctcccatgcgacccatgggtcccccaggacctcctgggcctcctggacctccacggagtggtggtggcatgcctctgccctcacggggtggcagaccaccccgcatactgttcattggaggcttcttccgagcaagggagactttaagtttgctcccttgaaaatctttcccatcaaaccattccacggcagccttggcagtgggtgggtcttcataggacactgtggcatcgcctttgggctttcctgtttccttgtccaggtagatgtggatcatgggttgcccagttctcttgttcatcttaacaaccccacactgcttaaagaagtctgccagatcatctagagtcacactgtcatttaatccttgtacataaattgcactgttgtcagagtcttcatctggatctacaggtgggcctagatcaagatctggtccttcatccatgggtccaccaggcttattgaagccacctcgctctccagcgctgcccattccaccgcgtcctcctccccgcccacctctgctcatgcctccacgatcaaatccccctcttcccctgccccggttatcagggccactcatgctccggttctctcctggtccggaaaatcctccagactcctgcccataaacacccatgctactggggtggtcctgtcggaatgaactctgctgcccgtagctgctgctctgttggctatattgacttggagcttggctgtaggatccagtttggggtgggtaactagtgggaggctgctgcccatagctgctttgttgaccatagctactctgctgtccatagctgctcggttgcccataggtgttctgctgagagtaactgctctgatcataactagtcggctgtgtagaggaatagctggtaggagggtaggatggaggtgcagtgactggctgcatggggtagctcccaggtacctggggataactgtagttactctgtccatatcctaggctgggctggttgtaaccccctgtgctagattgaggttgactagtctcagtgggcttgtttccatctgcggtcttgtaggtgcagtggctgctggctgctgcccataggctggataagcaggctgagtgccatatgcagactgagctgcataggaggcctgggtggtggtgactgtagcagtggtggtatcataagcaccagtgccatacccctggacaggctggctgtatgcctggggggcagttggagtagtataaccagtgggaggctgtccataagaagttgcataggcggtctgcccataggttgcagtggtctgagcctgggtatagctgacatcagtgggctgtccataggttccatagctttgttgcccatatgcctgggtggtctgtgcatatccttgagtgggctgggcggtgtaagcactgtagccctgctgcgctgcagcttggctataggtactgtaatccgtggacgccattttctcaccttagaaa

SEQ ID NO: 50 - DNA, 2101 bp, Homo sapiens
  misc_feature 2011,2043: n=a,c,g, or t
cctccatgttctacggcaggctagtggccgtggccacccttcggaaccaccggcctcggacggcccagcgggctgctgctcaggttctgggaagttctggattgtttaataaccatggactccaagtacagcagcaacagcaaaggaatctctcactacatgaatacatgagtatggaattattgcaagaagctggtgtctccgttcccaaaggatatgtggcaaagtcaccagatgaagcttatgcaattgccaaaaaattaggttcaaaagatgtcgtgataaaggcacaggttttagctggtggtagaggaaaaggaacatttgaaagtggcctcaaaggaggagtgaagatagttttctctccagaagaagcaaaagctgtttcttcacaaatgattgggaaaaaattgtttaccaagcaaacgggagaaaagggcagaatatgcaatcaagtattggtctgtgagcgaaaatatcccaggagagaatactactttgcaataacaatggaaaggtcatttcaaggtcctgtattaataggaagttcacatggtggtgtcaacattgaagatgttgctgctgagactcctgaagcaataattaaagaacctattgatattgaagaaggcatcaaaaaggaacaagctctccagcttgcacagaagatgggatttccacctaatattgtggaatcagcagcagaaaacatggtcaagctttacagcctttttctgaaatacgatgcaaccatgatagaaataaatccaatggtggaagattcagatggagctgtattgtgtatggatgcaaagatcaattttgactctaattcagcctatcgccaaaagaaaatctttgatctacaggactggacccaggaagatgaaagggacaaagatgctgctaaggcaaatctcaactacattggcctcgatggaaatataggctgcctagtaaatggtgctggtttggctatggccacaatggatataataaaacttcatggagggactccagccaacttccttgatgttggtggtggtgctacagtccatcaagtaacagaagcatttaagcttatcacttcagataaaaaggtactggctattctggtcaacatttttggaggaatcatgcgctgtgatgttattgcacagggtatagtcatggcagtaaaagacttggaaattaaaatacctgttgtggtacggttacaaggtacacgagtcgatgatgctaaggcactgatagcggacagtggacttaaaatacttgcttgtgatgacttggatgaagctgctagaatggttgtaaagctctctgaaatagtgaccttagcgaagcaagcacatgtggatgtgaaatttcagttgccaatatgatctgaaaacccagtggatggctgaaggtgttaaatgtgctataatcattaagaatactgtgttctgtgttattgttctttttctttttagtgtgtggagattgtaattgccatctaggcacacaaacatttaaaaggatttggactgcatttaattgtaccattcagaatggactgtttgtacgaagcatgtataatgcagttatcttctttctttcgtcgcagccagtcttttttgcttctcctacaaaacgtaacttgcaatttgccagtttattattgttggatacaaagttcttcattgataagagtcctataaataagataagtacgaagataaagctttattctttagtgttaaaatacagtatatctaataactagcctcattagtagagcagtatattaaaacaatgttttatgtaaaaagtgtttatcttcagcaccaaatacatgataaatgtatcaatcactatttataaacagagctttcaaacactcctcagaatattcttctaagtattttgatgaagtaactttgtaattatttgaacattgttttaatcattaggcaaacactgattaactgcaagtcttcatgattctgtcatattaagaaacacctgnaggtttgcttccaataaaggcatatatcccanggaattacagacaaaattaagaatgtcaatttaagttaataaaaatctcccaatatgc

SEQ ID NO: 51 - DNA, 1439 bp, Homo sapiens
cagaaggcaaactgtttgaggaaactgggcatgaagacccaatcacaaagactagtcgcgttttacgtctagaagccaaaagcaaggatggaaaattagtgccaatgactgttttccacaaaactgactctgaggacttgcagaagaaacctctcttggtacatgtatatggagcttatggaatggatttgaaaatgaatttcaggcctgagaggcgggtcctggtggatgatggatggatattagcatactgccatgttcgaggtggtggtgagttaggcctccagtggcacgctgatggccgcctaactaaaaaactcaatggccttgctgatttagaggcttgcattaagacgcttcatggccaaggcttttctcagccaagtctaacaaccctgactgctttcagtgctggaggggtgcttgcaggagcattgtgtaattctaatccagagctggtgagagcggtgactttggaggcacctttcttggatgttctcaacaccatgatggacactacacttcctctgacattagaagaattagaagaatgggggaatccttcatctgatgaaaaacacaagaactacataaaacgttactgtccctatcaaaatattaaacctcagcattatccttcaattcacataacggcatatgaaaacgatgaacgggtacctctgaaaggaattgtaagttatactgagaaactcaaggaagccatcgcggagcatgctaaggacacaggtgaaggctatcagacccctaatattattctagatattcagcctggaggcaatcatgtaattgaggattctcacaaaaagattacagcccaaattaaattcctgtacgaggaacttggacttgacagcaccagtgttttcgaggatcttaagaaatacctgaaattctgaaacactgcattcaactgggaattggaaacacactgaaatatttcatagtcttacttccaattgagttagcaaaaaaaaaattaataacttgagacttttaagttattaattttttaaaatgtgcttctccatctaaattttgcttagtctacatctcacttgcttatactattctctccattgatgcacatgcccattaacctaggaaagtagttttcaaatcatgctccttagaaggatgtggagtagagggaagggaaggattggtgatagcagagctccaggcctcccttccagtcagaacagttgagcagtttacaaattagtgtcctgcctctttgctagcaaatgcttttagacactgtggcagtgagtcatcctctaatttctatgactgcattttaagggaaaagataaaattcttccccttaaaattcgttaaagtttttgaataatctggggtcctaatgtgttctggtcatccctgattgatgctatctgaataaagttaaaggtcccttt

SEQ ID NO: 52 - DNA, 1842 bp, Homo sapiens
tttttttttttttttttttttttttttttggaaagccaccagatgggggcaactgcccactttattagacaataggtggcccacaggtctcctcagggcccaccctcacagtagacacaccacacaggacaacagaaggaacctgctacccagtcctctgtccctgggattctggtcctgggacaggtgggaaagaggaaggtgggggctggcctcacagaggcctcataaatacaaggtcactggccagggatgcaaaggagcgcagcagcagggactcggggaggatgacctgtcctagagtggcccatgtcacgcagcctcctgtgtgggagggggcctcggctcggcatccaagcggcacaggggactgtcatacaccatctgcaggttcaccttgtggcccaccagctcccggatattgttgatgccatatttgatcatcgttgggcgctccagggagaggccccaggcaatgaccgacacgttctcgggaagccccatgggcagcagcatctctggacggaagacccccgagtttccgacctccacccacttcttcaggccttggtggtagctgaacacctccatgctgggctctgtgtatgggttgtaggctggcttgaagcggagttgcgtgatacccagcttggtgaagaactcccgcagaacgcccatgaggtggcccaaggtgagaccatgatccgccaccacgccctcgatctggtggaactcagccaggtgcgtggcgtccagggtctcattccggaatacgcggtcgatggagaagtacttgaccggagtgaagggcttcttctgggcaaggcggtagagcgcacgggcgctggctgatgtggtgtgggttcgcagtaggtttttccgggcctcgtccagcttccagttatacttgtacccctgtgagccgtagccgccctgagagtgggtccgcttgacccgctggacatagtccattgggagctgcagggcctccgctggatctcgaaggaagaaggtgtcgtgctggtcacgggctgggtgctgctggggctggaagagggcgtcaaagttccagaaggagctctcaatgaagttatcagtcggcatctcggtgaaccccatctccaggaagatctgtcggaactgggagcggaccttgagcagcgggtgaaggtggccgctgtcggggaggacaccgtgggccaagaagttgtagggcttgaagggccggtcccgccaagagccactggagatcatctctgggctcagctctgtctcttgcttggagatgctggtactaaaggcactgcctttgctcacccagtaggtcatcagagtcacttcagccaacagcttcctcttcctcagctcgctcctctccttctcccccagcttctcagcctgtcccccccggaccagctggagccgccgctgcacctcatcctccatgctgtccaccactcggaacacccggggcccgtcagccgcactcttgtccacccgaatccacttgttggacatggccttgctgaagcccactttgccactgggcagtcgcataagctcgctctgggccaggccctctgggggaatgcttcgaaacacacgggcctcatggctgccctcccgggcaatctcctcgccctccgcagtaagctcccagtgcttggtggaccgaagttcagcctcgatgacctcgcccagcgcctgaaggctcttcacggcgcccaccaccgcctggtgctccatgcccagctcagccgccaactcggcgctgtccaggccgccatcagacgcctccagccgccggagcagcagttccgccacctgaccatccgccatgac

SEQ ID NO: 53 - DNA, 1434 bp, Homo sapiens
cgctctcccacaccactggcaccaggccccggacacccgctctgctgcaggagaatggctactcatcacacgctgtggatgggactggccctgctgggggtgctgggcgacctgcaggcagcaccggaggcccaggtctccgtgcagcccaacttccagcaggacaagttcctggggcgctggttcagcgcgggcctcgcctccaactcgagctggctccgggagaagaaggcggcgttgtccatgtgcaagtctgtggtggcccctgccacggatggtggcctcaacctgacctccaccttcctcaggaaaaaccagtgtgagacccgaaccatgctgctgcagcccgcggggtccctcggctcctacagctaccggagtccccgtgagtggggcctcaccggccccctgggcccagcctgggggcgacacttgccgggacgactctgggccagccccctgccgcggagatccatggggtgggaggtgatggctgccccaccagcgtcagaggcaaaggccaggcctgggcgtgactacccatgcacaagtgttagggacagagagacccttcctccagggggttggatcctctctggagcccaccattgtcttgtcaggccccttccctgccctctggagttttccccacataagcagccccccaaggcccctccatatgcctcctcccaattctcctccccaggacccaggggtttcctcactcccacctggggaatggctcccacggggaaacctcttcacttccggttctggcagcgacttctgcggctgcaccaggaatcctggttttctgagcctggctcccccagattctggtttggggacagggttcacaggctgtgcaggcgagagcagggcactggctggagagcagccgggtgggggagcatcccgggccagccgaggggctgagtgcccccaaagcccacaggtgcaccccttccctgaagcagaggtgaggtttggggggctgagtccccgacagggttgtctcttgggttcccagactggggcagcacctactccgtgtcagtggtggagaccgactacgaccagtacgcgctgctgtacagccagggcagcaagggccctggcgaggacttccgcatggccaccctctacagccgaacccagacccccagggctgagttaaaggagaaattcaccgccttctgcaaggcccagggcttcacagaggataccattgtcttcctgccccaaaccgataagtgcatgacggaacaataggactccccagggctgaagctgggatcccggccagccaggtgacccccacgctctggatgtctctgctctgttccttccccgagcccctgccccggctccccgccaaagcaaccctgcccactcgggcttcatcctgcacaataaactccggaagcaagtgag

SEQ ID NO: 54 - DNA, 1545 bp, Homo sapiens
ttgagatataactgaagctttatctggagtgggggaatgggggtgtggtcagttggggcacccaaagacaaccatgctctcggtgaaggccccgaggtcctggcattgtttctggttctcttcgtcttggcattcgtcctcctcaggccagtgctccacccaagtgtccttcccgatgatgtagctgaggttgggcttctctccccagaaatcggaggagagaccccacatgaggtagtgtttcttctcctccagcttcagggcttctctgcacttgatggggctgatgaacgtgcgctgctgtccaacctgcacctcatccgagcctgacttgatggtctgctcaatggccatgatgtactcgtcaaagtcattggacagctgaaccttgaccagtcgggtcttgtacacatagtccactcctggctcacaggccttgtccagccgttcttccagggtgaccttgtcatccgacttttgtatgaagcaattctcctcagcacagcggcacagttcatcacggcagagcttgttcagctttccatcctccttttccggatggtagaaccgggtacagctttcctccaggttgtaataggcgtagaccttgactgctccaggctggataagctctacattaaagtattggtgaactttgaaagctagacagtcatcctcagagtgtgagaccttgtccaggtagatgatgagggtgttcctatcggagaaggctttgtccagctcatacttggagatgtatctgtcaacaccattggccagctgcttcaggtcatctgtgtctggagcaaagccagtcatcatggatatgtccaatatagacatagtggcatcctggtctccccggtacctggtacagatctcaaggatcatagtgttcttggcatcctgaggcctcttttctgtttccggtgctggttttatggtgaccttgaggtcgaatttattacaggtgagttgatctttggccttagcatggtacattgtcaccaccgacaaggtgccttggccttttccttcagctgtgactgtgaaaccctcattttccttggtctcttctgatcgcaggaggctggcagattcccagtggatacggtgggtgatcttggagctgcggctgggcagttggagggacacatcaaggttcagttcctggtggtcaggggcgtccttttggtattgagccaaggcttggaacaccatgaaggtggcctgggtagagccatagccaccaccgtagtatctctgttcattgagccaacgcacgacgggaggcacaaagtcaaagtcttttagctgcagtagggccaagagggcataggatgtggcctccacgttgtagagctgcttaccagggtcctcccagcggttcttatctttggctgtggtcagaaatttgttaagaagaggccccttcagcctgcccatctgggccagagcatagccagcaatggccacagtgtaggatctctgtaggttcatgtagttggcttcaaggaagtctcctgctttagtgtaggcctcttt

SEQ ID NO: 55 - DNA, 1352 bp, Homo sapiens
  misc_feature 1177,1274: n=a,c,g, or t
cgagactgcgcggccgttgggcgtgcagcggcgccagtcggcggacgaggggcccccgggagttgctggactgagacatgagcctccaactgtgtggttgggctcggtagcacatcgtgggacttgggtgtgcgcccacagatggtttggccctgcagtgaccagagcagcccaagccgccaccatggtgaaattgctagtggccaaaatcctgtgcatggtgggcgtgttcttcttcatgctgctcggctccctgctccccgtgaagatcatcgagacagattttgagaaggcccatcgctcgaaaaagatcctctctctctgcaacacctttggaggaggggtgtttctggccacgtgcttcaacgctctgctgcccgctgtgagggaaaagctccagaaggtcctgagcctcggccacatcagcaccgactacccgctggccgaaaccatcctcctgctgggcttcttcatgaccgtcttcctggagcagctgatcctgaccttccgcaaggagaagccgtccttcatcgacctggagaccttcaacgccggatcggacgtgggcagcgactcggagtatgagagccccttcatggggggcgcgcggggccacgcgctgtacgtggagccccacggccacggccccagcctgagcgtgcagggcctctcgcgcgccagccccgtgcgcctgctcagcctggccttcgcgctgtcggcccactcggtctttgagggcctggccctgggcctgcaggaggagggggagaaagtggtgagcctgttcgtgggggtggccgtccacgagacactggtggccgtggccctgggcatcagcatggcccggagtgccatgcccctgcgggacgcggccaagctggcggtcaccgtgagcgccatgatccccctgggcatcggcctgggcctgggcattgagagcgcccagggcgtgccgggcagcgtggcgtccgtgctgctgcagggcctggcgggcggcaccttcctcttcatcaccttcctggagatcctggccaaggagctggaggagaagagtgaccgtctgctcaaggtcctcttcctggtgctgggaacaccgtcctggccggaatggtcttcctcaagtggtgagcggccttgccattgtccctgccgccggagcccgccgggagccccgggngggacacaggccgcgtcccccgtccgggcgtcccccaagagcgagcactgtggccctgggccaccacctgtgcacaaggggcctcccgggaccaggntgtgcccccgatcctacaccttgagcctcagagcattgatactttttaaaatacttctttctcttaaaagtctttccc

SEQ ID NO: 56 - DNA, 2756 bp, Homo sapiens
tgtgggatgggaagtgaagccccagcgagcggctgcagcggggccgtgaggagcagccagcgggaggcggcggcgagtcggtgagcagctgggaagagcagaaccggggcggagcacctgcaggcgcgggcggcggccccaccatggcgattcgcaagaaaagcaccaagagccccccagtgctgagccacgaattcgtcctgcagaatcacgcggacatcgtctcctgtgtggcgatggtcttcctgctggggctcatgtttgagataacggcaaaagcttctatcatttttgttactcttcagtacaatgtcaccctcccagcaacagaagaacaagctactgaatcagtgtccctttattactatggcatcaaagatttggctactgttttcttctacatgctagtggcgataattattcatgccgtaattcaagagtatatgttggataaaattaacaggcgaatgcacttctccaaaacaaaacacagcaagtttaatgaatctggtcagcttagtgcgttctacctttttgcctgtgtttggggcacattcattctcatctctgaaaactacatctcagacccaactatcttatggagggcttatccccataacctgatgacatttcaaatgaagtttttctacatatcacagctggcttactggcttcatgcttttcctgaactctacttccagaaaaccaaaaaagaagatattcctcgtcagcttgtctacattggtctttacctcttccacattgctggagcttaccttttgaacttgaatcatctaggacttgttcttctggtgctacattattttggtgaatttcttttccacatttcccgcctgttttattttagcaatgaaaagtatcagaaaggattttctctgtgggcagttctttttgttttgggaagacttctgacctttaattctttcagtactgactgttggtttgggccttgcaagagcagaaaatcagaagctggatttcagtactggaaacttcaatgtgttagctgttagaatcgctgttctggcatccatttgcgttactcaggcatttatgatgtggaagttcattaattttcagcttcgaaggtggagggaacattctgcttttcaggcaccagctgtgaagaagaaaccaacagtaactaaaggcagatcttctaaaaaaggaacagaaaatggtgtgaatggaacattaacttcaaatgtagcagactctccccggaataaaaaagagaaatcttcataatgaattataaactaattgattaatgtccccaaagaaatctgctttctactatatctttcagcattagagatttttctgttcttgaaaatacagtctgtgctctttgatttttgctattgtacggtttcatgcatttttttaaagggcatttgaggggaggattattgctatgaatgaaaaaaatattttagcttagactaagctacctgccttcaaaatagtttagggaccaccaccatattttattttgtttttatttttgaacatttttctaatgatttggagagaaaactatttacaaaaattccacatatcagtgatacaatttcttgctgtcaccaattttttataatagcagagtggcctgttctaagaaggccatattttttaagttatctttcagggtaacatggaaatactataaagttggatgtcaaactttaatatgttttcagtgttctctaattttttggaatttttgtagactttacacctggaaaaaaagatttgtaaaatcaccggaacaattgtgtgctttattttataggtagtggttattagtattacatccccattttaaaaacaaaaacataataatggttacaacacgtggagttttactaacatacatattaaatcaaagtatattcttaaaagtacttgtgaagtaaaatctttcttgtgcattttcaatacttgtaaactggaaatcagaaaatatttactatgaacaggaaaatctgacatatagccctttttgatatgtttattaataatgattcttaatggggctcataataagtttaatatgcacagcatcttagaaaagtttaacctgcaaacacttttaaaacataatgcctacttgatttatatctataaaaagactgacaggtaattatatttggaaaacatttaatgcactaactttaaagaaattgaaaattcaggtggataaatagtcttacaaaagacaatgtgctttatgttatacctatagctttggtcccatctttaattgagaaacatttatctgtataaaacatatttttggataaatatatatatatatatttgtatcgctacagaaaggctctaaaaagcatttgaggaaaatatttggttcccttttctataatcatcctttaagattcttatagctacatttggtttattcatcatatttacagtatatatattgttcttttcagtgttcacatcttgttccccatttctcacttgtgtcaccagctgtttgtgccatttttagtgtaaaagttgcagacctattagatctgcagtttaagttgccatgctgctaggaaattgtcctttttctttctagctgttaacctacttcctggaaaaagtagtagctctctgtagcattatggagtttcagtggaaccaaatttttgccattaaaaactggcattatactgaactatacattgagaaatcaatcaaaataaaaatttttactttcc

SEQ ID NO: 57 - DNA, 1499 bp, Homo sapiens
ttttaaagttacaagattcttttaatattttcacaatgttaaaactaaaactgagctctaggctatgtgtgtaagtaaatctagaacacaaaagggttaaataagattttctcttttaaagatacaagaatttaagctttccttacatttaacaaacttcacagaacagatactgcaggggaacaagccccaccccccaccccccccagctctaagtcaggaagcgaacatgggcttcgctcccccaggccagctcccctgggctccttcccatggctgcctccacgcagcaggcagaggagggggcggggggccctggggagggccgggaagggctcgcacagcctcttcgggaccagagcttggcggaagcctatggggggctgcctcactgaggatggcccgtatggtggccaagggctgtggcttgacagcagtggtaaacgctgggcagacctggcccctctgccctgggttgccctagagcaagacaccggtctgggtcctgaagcaagaattaaggctggggattttgcagcgggttccactctggtgggtggagggtgggaagagcatgacttcctatttcagtacgtcggatcaaaaaacatttgcagttgcaggtgttcagctgttaatttgcagacagagttgaaccatttgttgttttataaaaaggaaagttgctgggttaaactattccagtagcctatgtgtgggcagatccacgctgcctccgcaggggcctcctgccctcacccacctggatctgatgcggcactaggaccactgggactgctcaccctgcctgggctttcaagggaatcctgatcctgtccacccagccccagccccacctgactggtagtgatttcctaacatggggcaaccaggcccacccccacccttccccacctggcgtgcgcagttgcagctgctgaaatcctctgtgaacatgagggggcacaggtggagaaatgtaccctcaggccctcacctaccagagcaaatatcactctcggagctgggccacagccacaaaccgctgttctagacagatccaaacccactgtccctgggacgtatgctgccttcccttactaaacttgctatatggtagatgtggactgggtgtccttggactatggggctgcatagaaacgagaatggaggccacgacatcatcctcttggcccctggaggcacgggcggctccagctggaagggcagagcccgtgggcggcagcttccccagctgctgctcccagcacttctactgattcttgttggctatgaaatgtctttttaaaaaactcccaatatagaaatctggctgcagaggccagtgtgcagacccagccaccgcgctgtgctgccattcgccacatctggtccatgccagatccctgcactggcgaatggcagaccagagccggcggaggcggggcactctggctgcttctcgtgaccttggatcctgtgtagaaaaggcggggaaa

SEQ ID NO: 58 - DNA, 1463 bp, Homo sapiens
tttttttttaacaattaggaattttttatcgttatagatgttgttaaaggactccagtagcaaagatcaaagtctccgaattttgcctttggagaagggggtttcatttcagacatcaaaggtaaggctctcaagtcaatttatgctctgctgggttgagtcagtcaggatacaaattaaggtccatatatttcagtgacaagaaggaaacggttatgtaaatacacaagtattaacatcaatctgtattaaattatgtaaacatatacatcttctgaggtcagcacatagatcctcttctttgagcagagctctactgaagcattgctcgaatctgtttggaagttgattcatcgttcaagtgctttgtagtgaacctgagggcatttagcagcccctccacactgtctggggcctgctccttcaaaacttttatgcagcctttcatatcgatcttggatgtcttgcagaaagctcccacagggtggacatggtcatagaggatgatgactcccaccatcaccctcatgcagaacatcagggtctcttcactcgtaaacctacttctgtactccggagtttccagcatgactttacagacacttgtcattgtgctgaggcagtctgtggtgttctctattggcagagtttttttttcagagacaaagtgcattgtggcattgctaagggttttcagcattggcgtggcttctgcatagaagagggacattcgattggccatctcattattgacttcattctcaatgtctaggtgcatgttgttgatgcggttgcgactgattgttcttctgtagtagctgaagtcattctgaatagccgggttcctcatcttcagctcatcgaatcgaagggtaaaatgtaaaatttcggcaaactcctttgccagggcctgttccctttccaggtgttgggttggtgtgtagggtggacaagtcagagattccaataaactctgaagagctttttctagtctaatggaaaactcgtaaaatctctttagcctcacaacaagagggcacaccgcattccaagctttttcttgaagctgaatgtcattgggattttgaattgcatctcggatctctgggcctgcgcctttgtaagcctgcaggtctgcaaggatgctctcagaatcctgaaggacggcgctgatctggttccagatttctctctctccttctgtaggctgagcattttcaaaatccaggaaaaagtgtggatagttttcaatttccctggtaaggactttgagcaggtttcccatcccagcaaacctggaaatatctcctgtgattcagtttcaccaatccaggctgatgggatgaaccagcttagctgctgtctggccaaagtaagttggacttcccaaatcaggacggtggcctcctagagtcctgtagcttttctgtccttaagatggtgtaccctgcgagtcgccgaaa

SEQ ID NO: 59 - DNA, 614 bp, Homo sapiens
gcttttttttttttttttttttttttttttttgctaaatttttttatattaaaaagtggcatgaactttttatgtagaacaaaaatcttgggaaggcaaaattggataaaaccattaaaacagaaatagagtgcttcaaatgaatcccatcaccttgtgatgtcccttattaacagtctctaaaccaataccagataccagaacagtccatcctaaagaacgagcagcagtccagggcctccacgctacttcatgcaataactgtttaaattaagccagcaggacctgtttcctttgtataagctacaacttctgaagcattacagttcctctagcacggtgctcaatcacagcacttggagcacctctctgcataaaggcaaacaaaacattgcctaaggaccctgcaatgccacccttggaggcttacaaaacagtagttaaaagtttcggagtgtgcaccacattgccagcaatgggatgtgtcacaatagcagatgtcaaaagagttaagctaatatttctctttaaagtacatctgaaatagaaaaatctttaatatacaccatttgtaaacaaaattgcacttgattttgcttttttaaccttagaaa

SEQ ID NO: 60 - DNA, 2160 bp, Homo sapiens
acatagacctgtttctcgactgttaacagatgggatcatgagagttggatctactgcatcaaagaaactatcagaaaagttggtagcagaatggttttctcaggcagctgatggtaacaatgaagcattttctaaactcaagctttatgcacaagtctgcagatatgacctaggtccttatcttgcttccctgccattggacagctctctactttcccagccaaatttagttgcccctacaagtcagtctttgattactccacctcagatgacaaatactggaaatgctaatactccatctgccaccttagcatctgcagcgagcagcactatgacagtgacttcaggtgttgccatatctacttcagttgccacagctaattcaactttgaccacagcttcaacttcatcttcatcatcctccaacttgaatagtggagtatcatcaaataaactaccttcgtttccaccctttggcagtatgaacagtaatgctgcaggatccatgtctacacaagcaaatacagttcagagtggtcagctaggagggcaacagacatcagctctacagacagctgggatttctggagaatcatcttcacttcccactcagccgcatcctgatgtgtctgaaagcacgatggatcgggataaagtgggaatccccacagatggtgattcacatgcagtcacgtatccacctgcaattgttgtttatataattgatccttttacatacgaaaatacagacgagagcactaactcttctagtgtgtggacattggggctacttcgatgctttctagaaatggtccagactcttcctcctcatatcaagagtactgtttctgtacagattattccttgtcagtacctgttgcaacctgtgaagcatgaagatagagaaatctatccccagcatttaaaatccctggctttttcggcctttacccagtgtcggaggccacttccaacatcaaccaatgtgaaaacattgactggctttggtccaggtttagccatggaaactgcccttagaagtcctgatagaccagagtgtattcgactttatgcacctccttttattctggctccagtgaaggacaaacagacagagctaggagaaacatttggagaagctggacagaaatataatgttctttttgtgggatactgtttatcacatgatcaaaggtggattcttgcatcttgcacagatctatatggagaacttttagaaacttgtatcattaacatcgatgttccaaatagggctcgtcggaaaaaaagttctgctagaaaatttggtctacagaaactttgggagtggtgcttaggacttgtacaaatgagttcattgccatggagagttgtaattggtcgtctaggaaggattggtcatggagaattgaaagattggagctgtttgctgagtcgtcgaaacttgcagtctctaagtaaaaggctcaaagacatgtgtagaatgtgtggtatatctgctgcagactcccctagcattctcagtgcttgcttggtggcaatggagccgcaaggctcttttgttattatgccagattctgtgtcaactggttctgtatttggaagaagcacgactctaaatatgcagacatctcagctaaataccccacaggatacatcatgtactcatatacttgtgtttcctacttctgcttctgtgcaagtagcttcagctacttataccactgaaaatttggatttagctttcaatcccaacaatgatggagcagatggaatgggtatctttgatttgttagacacaggagatgatcttgaccctgatatcattaatatccttcctgcttctccaactggttctcctgtacattctccaggatctcattacccccatggaggtgatgcgggcaagggtcagagtactgatcggctactatcaacagaacctcatgaggaagtacctaatattcttcagcaaccattggcccttggttactttgtatcaactgccaaagcaggtccattacctgactggttctggtcagcatgtcctcaagcacaatatcagtgtcccctttttcttaaggcctctttgcacctccacgtgccttcagtgcaatctgacgagctgcttcacagtaaacactcccaccaccacgaaac

SEQ ID NO: 61 - DNA, 1788 bp, Homo sapiens
ggtccttctgttgatcctgtcagtcttacttttgaaagaagatgtccgtgggagtgcacagtccagtgagaggagggtggtggctcacatgctgggtgacatcattattggagctctcttttctgttcatcaccagcctactgtggacgaagttcatgagaggaagtgtggggcagtccgtgaacagtatggcattcagagagtggaggccatgctgcataccctggaaaggatcaattcagaccccacactcttgcccaacatcacactgggctgtgagataagggattcctgctggcattcggctgtggccctagagcagagcattgagttcataagagattccctcatttcttcggaagaggaagagggcttggtatgctctgtggatggctcctcctcttccttccgctccaagaagcccatagtaggggtcattgggcctggttccagttctttagccattcaggtccagaatttgctccagcttttcaacatacctcagattgcttactcagcaaccatcatggatctgagtgacaagactctgttcaaatatttcatgagggttgtgccttcagatgctcagcaggcaaggtccatggtggacatagtgaagaggtacaactggacctatgtatcagccgtacacacagaaggcaactatggagaaagtgggatggaagccttcaaagatatgtcagcgaaggaagggatttgcatcgcccactcttacaaaatctacagtaatgcaggggagcagagctttgataagctgctgaagaagctcacaagtcacttgcccaaggcccgggtggtggcctacttctgtgagggcatgacggtgagaggtctgctgatggccatgaggcgcctgggtctagtgggagaatttctgcttctgggcagggaaccagatgccatctttattgagatctcaaagaacagcatcctatgggaagacagaagaaaatgccaaggtcgcttccttcagggttttggagacatattacacagaagtgagtccgtgctgctgcacatgccccagcctctgaatctagagctcagttcagggcccatcactggactgagggacaggctcatctaattctgagtggatattactctgcattataatgaagccaacagtcatatcttctgatgtggagatttgagaagcatttgtattggatgtgaccgtcaaaatgcgccccatatcactgcaacacctacaagttttcttgcatggggtgctcagactttcacctctggcaagtattactgggaggtccatgtgggggactcttggaattgggctttcggtgtttgtaataagtactggaaagggaagaatcagaatggcaatatatatggagaggagggactctttagtcttgggattgttaagaacgacattcagtgcagtctctttaccacctccccagttacactgcagtatgtcccaagacctaccaaccatgtaggattattcctggattgtgaagctagaactgtgagcttcgttgatgttaatcaaagctcccctatatacaccatccctaattgctccttctcacctcctctcaggcctatcttttgctgtattcatctctgaccagagacaaatcagaaatgtgtttatctgctgtgggaacccctttatcccataaagccctcttccttgtgccttatcaaacaggacaaataggttctgttttatgtcttgaattgcattctaatgttattaaaactcatttattgtgttactattaaatgtggtaaaaccac

SEQ ID NO: 62 - DNA, 1753 bp, Homo sapiens
agctccggtgctcctttcctaactccactggctgcggcatctgtgggaaaagtgtggctgggtcttcgaggagccgcaccaatggcttccgtgctgtcctacgaaagcctggtccacgccgtggccggagccgtgggaagcgtgacagcaatgacagtgttttttcccctggatacagctagacttcgacttcaggttgatgagaaaagaaaatccaaaactacacacatggtgctcctggagatcattaaagaagaaggactcctggcaccatatcgagggtggtttccagtgatttccagtctctgctgctccaattttgtctatttctacacttttaatagcctcaaagcactctgggtcaaaggtcaacattctaccactggaaaagatctggtagttgggtttgttgcaggagtggttaatgtgttgctaacaactccactctgggtggtaaacaccagactgaagcttcaaggagcaaaatttaggaatgaagacattgtaccaacaaactacaaaggtatcattgatgcttttcatcagatcattcgcgatgaaggaatctcggctttatggaatggcacatttccctcattgctgttggtcttcaatcctgccatccagttcatgttttatgaaggtttaaaacggcagcttttaaagaaacggatgaagctttcttccttggatgtgttcatcattggtgcagtagccaaagcgattgccaccacggtgacctatcccctgcagacggtacagtcaattctgaggtttgggcgtcatagactaaacccagaaaacagaacattgggaagtcttcggaatattctctatcttcttcaccaacgagtaagacgttttggaataatgggactctacaaaggccttgaagccaaactgctgcagacagtcctcactgctgctctcatgttccttgtttatgagaaactgacagctgccaccttcacagttatggggctgaagcgtgcacaccaacactgagacgccttcccatgaaaaattccgaagatgctcaagagggaggtttcctcctgagtgaagagaagtgattctcccttgactctggctcctgccaccacaaatgttaccctcattggcttgaaaagcatccaagggtgcacaaggagtatggccaactggacctgttgtcaccttaattgtcatgctggcatggttgcattttggggtggccagttggcctaatgtgaaagaaacattgctgaaaacctaaaaatgaaagtttgtgagtgtttattggttttcttaagagaaatggactattttgctctcatgtgtaatgttttctatttaaatctttcttaaatataccagctgttctctttccctgaactctcccccaggttctaggacaaatttaataacatgtaattctcctcaaatacttttgtatgtcgcagggttggtgttttcctccctaaaactaacattagggctgtgccacgggcatgactttatttttgttgggcttttttttccctgcttaaggagaggtgtcttttttggatatgagctatttattttgtgaaatgaaaattgttcacccaaatgattctcttataaactatttgtaaatgtcacttattcattagtgtttgacataatttttagaatatttattttgaatcaatcctttcattacgaaagacttgaagttttgtgtccattcttacaagccctggtcagtcaagtcccaataaatggtcagcac

SEQ ID NO: 63 - DNA, 1244 bp, Homo sapiens
agggtggtaaccaggaccatggtgaggacagagaacgggtctgagccgggtgcctccatgcctcctccattctcagtggagaacggaaccagcttcctggaaaatgtcactcgggccttgggtaccctgcaggagatgctgagctttgaggagactgtacccgtgcctggctccgccaatggcatcaacgccctgggcctcgtggtcttctctgtggcctttgggctggtcattggtggcatgaaacacaagggcagagtcctcagggacttcttcgacagcctcaatgaggctattatgaggctggtgggcatcattatctggtatgcacctgtgggcatcctgttcctgattgctgggaagattctggagatggaagacatggccgtcctggggggtcagctgggcatgtacaccctgaccgtcatcgtgggcctgttcctccatgccggcattgtccttcccctcatctacttcctcgtcactcaccggaaccccttccccttcattgggggcatgctacaagccctcatcaccgctatgggcacgtcttccagctcggcaacgctgcccatcaccttccgctgcctggaggagggcctgggtgtggaccgccgcatcaccaggttcgtcctgcccgtgggcgccacggtcaacatggatggcactgccctctacgaggccctggctgccatcttcattgctcaagttaacaactacgagctcaacctgggtcagatcacaaccatcagcatcacggccacagcagccagtgttggggctgctggcatcccccaggcgggtctggtcaccatggtcattgtgcttacgtcggtcggcttgcccacggaagacatcacgctcatcattgccgtggactggttccttgaccggcttcgcacaatgaccaacgtactgggggactcaattggagcggccgtcatcgagcacttgtctcagcgggagctggagcttcaggaagctgagcttaccctccccagcctggggaaaccctacaagtccctcatggcacaggagaagggggcatcccggggacggggaggcaacgagagtgctatgtgaggggcctccagctctgccccccagagaggagggaagggggctggggaggggagtcctggtgacacatctgttgcccaactgaccgtgggctgaacacacgttctgcttgactcatttaggggggagggaaaagtaaataaaggagcaggaatgaaatgggt

SEQ ID NO: 64 - DNA, 1725 bp, Homo sapiens
agaatggagaccaaacctgtgataacctgtctcaaaaccctcctcatcatctactccttcgtcttctggatcactggggtgatcctgctggctgttggagtctggggcaaacttactctgggcacctatatctcccttattgccgagaactccacaaatgctccctatgtgctcatcggaactggcaccactattgttgtctttggcctgtttggatgctttgctacatgtcgtggtagcccatggatgctgaaactgtatgccatgtttctgtccctggtgttcctggctgagctcgtagctggcatttcagggtttgtgtttcgtcatgagatcaaggacaccttcctgaggacttacacggacgctatgcagacttacaatggcaatgatgagaggagccgggcagtggaccatgtgcagcgcagcctgagctgctgtggtgtgcagaactacaccaactggagcaccagcccctacttcctggagcatggcatcccccccagctgctgcatgaacgaaactgattgtaatccccaggatctacacaatctgactgtggccgccaccaaagttaaccagaagggttgttatgatctggtaactagtttcatggagactaacatgggaatcatcgctggagtggcgtttggaatcgcattctcccagttaattggcatgctgctggcctgctgtctgtcccggttcatcacggccaatcagtatgagatggtgtaaggagaagtctttcaagaatgacggaataagagacctgttttaaaaaggaactgcagcaatctttgaaagacttccaaagaatgttagagcacagtacataatacacttgccctgctccctctaccccttaccccacaacgtgcaactgacactcccacccagtctctgctccacctttcagcccacgtcacgtgtagtgtccattttgtgaagccctgttgtgccacagagtgtagccaggtccccctgcagctagtcctagtgaacctcaccccgaggccctgcatgggccagcccctccatctgtacttggtccaactgcaactcatcatcggtgactggttatcacaccatcgctggcccctttgggccctgcatgtagtgtgggaggctcctgttagctcctcactgtggtaaatgccacacacctttaagtagataagcagacgatagttatctgttcttttgacttaatctcatttggtttgattttccctctactaaggctttcctaccttcttcaggctgcctaagacatgtaacgaaacacttcaataattgtccatgaggagaaaaaaagcatgtgtcatgcatgaaggaaactgaacttgaggtggcctccttgcttgttacatacctgggtatgtgtaggcagtttagtgcatctttgcctctcagttgaaacctgtataaccctgttacaaagctgtgttgttgcttcttgtgaaggccatgatattttgtttttccccaattaattgctattgtgttattttactacttctctctgtattttttcttgcattgacattatagacattgaggacctcatccaaacaatttaaaaatgagtgtgaagggggaacaagtcaaaatatttttaaaagatcttcaaaaataatgcctctgtctagcatgccaacaagaatgcattgatattgtgaacatttgtgatatatgtattaataaatagagcaattgccaccc

SEQ ID NO: 65 - DNA, 1098 bp, Homo sapiens
agtgagactccatctcaaaaacaaacaaacaaaaaacatatatcgttggccctgggctggctgccctcatggccccgtggctccctctcgcctgcaggtgggtgacatcaccatcctggtgaacaatgccgccgtggtccatgggaagagcctaatggacagtgatgatgatgccctcctcaagtcccaacacatcaacaccctgggccagttctggaccaccaaggccttcctgccgcgtatgctggagctgcagaatggccacatcgtgtgcctcaactccgtgctggcactgtctgccatccccggtgccatcgactactgcacatccaaagcgtcagccttcgccttcatggagagcctgaccctggggctgctggactgtccgggagtcagcgccaccacagtgctgcccttccacaccagcaccgagatgttccagggcatgagagtcaaggtttcccaacctctttcccccactgaagccggagacggtggcccggaggacagtggaagctgtgcagctcaaccaggccctcctcctcctcccatggacaatgcatgccctcgttatcttgaaaagcatacttccacaggctgcactcgaggagatccacaaattctcaggaacctacacctgcatgaacactttcaaagggcggacatagagacaggatgaagacatgcttgaggagccacggagtttgggggccacagcacctgggcacacacccgagcacctgtccattggcatgcttctgctgggtgagcaggacagctcctgtccccagcgaagaatccggctgcccctgggccagtcccaggacctttgcacaggactgatgggtgtaacctgacccccacagggaggcaggaaaacagccagaagccaccttgacacttttgaacatttccagttctgtagagtttattgtcaattgcttctcaagtctaaccagcctcagcagtgtgcatagaccatttccaggagggtctgtccccagatgctctgcctcccgttccaaaacccactcatcctcagcttgcacaaactggttgaacggcaggaatgaaaaataaagagagatggcttttgtg

SEQ ID NO: 66 - DNA, 2407 bp, Homo sapiens
ccgcgagcttctcctctcctcacgaccgagagcagtcattatggcgaaccttggctgctggatgctggttctctttgtggccacatggagtgacctgggcctctgcaagaagcgcccgaagcctggaggatggaacactgggggcagccgatacccggggcagggcagccctggaggcaaccgctacccacctcagggcggtggtggctgggggcagcctcatggtggtggctgggggcagcctcatggtggtggctgggggcagccccatggtggtggctggggacagcctcatggtggtggctggggtcaaggaggtggcacccacagtcagtggaacaagccgagtaagccaaaaaccaacatgaagcacatggctggtgctgcagcagctggggcagtggtggggggccttggcggctacatgctgggaagtgccatgagcaggcccatcatacatttcggcagtgactatgaggaccgttactatcgtgaaaacatgcaccgttaccccaaccaagtgtactacaggcccatggatgagtacagcaaccagaacaactttgtgcacgactgcgtcaatatcacaatcaagcagcacacggtcaccacaaccaccaagggggagaacttcaccgagaccgacgttaagatgatggagcgcgtggttgagcagatgtgtatcacccagtacgagagggaatctcaggcctattaccagagaggatcgagcatggtcctcttctcctctccacctgtgatcctcctgatctctttcctcatcttcctgatagtgggatgaggaaggtcttcctgttttcaccatctttctaatctttttccagcttgagggaggcggtatccacctgcagcccttttagtggtggtgtctcactctttcttctctctttgtcccggataggctaatcaatacccttggcactgatgggcactggaaaacatagagtagacctgagatgctggtcaagccccctttgattgagttcatcatgagccgttgctaatgccaggccagtaaaagtataacagcaaataaccattggttaatctggacttatttttggacttagtgcaacaggttgaggctaaaacaaatctcagaacagtctgaaatacctttgcctggatacctctggctccttcagcagctagagctcagtatactaatgccctatcttagtagagatttcatagctatttagagatattttccattttaagaaaacccgacaacatttctgccaggtttgttaggaggccacatgatacttattcaaaaaaatcctagagattcttagctcttgggatgcaggctcagcccgctggagcatgagctctgtgtgtaccgagaactggggtgatgttttacttttcacagtatgggctacacagcagctgttcaacaagagtaaatattgtcacaacactgaacctctggctagaggacatattcacagtgaacataactgtaacatatatgaaaggcttctgggacttgaaatcaaatgtttgggaatggtgcccttggaggcaacctcccattttagatgtttaaaggaccctatatgtggcattcctttctttaaactataggtaattaaggcagctgaaaagtaaattgccttctagacactgaaggcaaatctcctttgtccatttacctggaaaccagaatgattttgacatacaggagagctgcagttgtgaaagcaccatcatcatagaggatgatgtaattaaaaaatggtcagtgtgcaaagaaaagaactgcttgcatttctttatttctgtctcataattgtcaaaaaccagaattaggtcaagttcatagtttctgtaattggcttttgaatcaaagaatagggagacaatctaaaaaatatcttaggttggagatgacagaaatatgattgatttgaagtggaaaaagaaattctgttaatgttaattaaagtaaaattattccctgaattgtttgatattgtcacctagcagatatgtattacttttctgcaatgttattattggcttgcactttgtgagtattctatgtaaaaatatatatgtatataaaatatatattgcataggacagacttaggagttttgtttagagcagttaacatctgaagtgtctaatgcattaacttttgtaaggtactgaatacttaatatgtgggaaacccttttgcgtggtccttaggcttacaatgtgcactgaatcgtttcatgtaagaatccaaagtggacaccattaacaggtctttgaaatatgcatgtactttatattttctatatttgtaactttgcatgttcttgttttgttatataaaaaaattgtaaatgtttaatatctgactgaaattaaacgagcgaagatgagcacc

SEQ ID NO: 67 - DNA, 1575 bp, Homo sapiens
atgcttatggtcccagctattttgggggttgagggaggagaattgcttgagcccaggaggttgaggctgcagtgagccatgtttacaccactgtacaccagcctgggtgacagagttgagaccctgtctaaaaaaaaaaaaaaaacagcaaaactctcccccgccaaaaataaaaaaaaaaaagatgaatatggagggagttgtaaaattaaagaaggtacatgggtgcatgtgtgcttgtgtgtgtgtgtgtctgtctgtctaacaacagcagaagcaggcaagggctactgtggtagtcactgttgttcctctccccattttgcttcacagtttacaagtccttccactttctctctgaggcagaaagagcaagggtttttctctccattttatggttgggaaaattgaggcctgcctgagtgtgtgacttgtggcaagtcactctggtcatctagggcagaggctccccagatcccaggcctcctgcctccagtccccagcccgcagcccaggattaggcagagccagttgctttcccgtggctgccctgactccttacagggatcactgagattctgatgaacagaccttctgcccgcaatgccttggggaatgtcttcgtcagtgagctgctggaaactctggcccagctgcgggaggaccggcaagtgcgtgtcctgctcttcagaagtggagtgaagggcgtgttctgtgcaggtgcagacctgaaggagcgggaacagatgagtgaagcagaggtgggggtgtttgtccagcgactccggggcctgatgaatgacatcggtgaggatctgggtgtggggtggaggagggggtttgggggtccctgcagatgacagtcccgctacccccaccagcatctaaggagagtcttctttctgtttggagttctgtgataagacagatgactcacccagggggatggaggaggatgaccgagggcagttctctcagagagggagttctggctcttcagcttttgtgtcccgccccaccctcagggttcaagcctggccattccaaagcagttaagtttccccaagcatgctttcaagttttgacaattgctgttacctttgcgtgagataccccttcttggttacttgaactttgacttgtccttcaagccctccagtacctcctcctccaggaagccttcccaacccaccctatgagctttttattggagcactgatgatcctgggtcaataatgcctgatacacatttgtcttccccatgagactgagccccatgggaacaaaggctatgtctgattcattctgtgttcccagttcccagcacccagcacagggcttggcacaaagaaagggaggccccagggaggccagcggattaggcctgaacagggatcatccagcccatcctcccattcctcttccctggctgattctgtaactttccctaaagggaaaattggcttctgagataacctggctgcgggaagcagaggttgtcgtgagcagagattgtgccattgcactccagcctgggcaacaacagcgagactccatcactcaggaccatgtaac

SEQ ID NO: 68 - DNA, 1553 bp, Homo sapiens
tcatccgggttctccgcgccttcacctcttccgtgccgctgctgccaggggccctggtcgactaccctgatgtgctgccctcacgcctccaccctgaaggcctgggccatggccggacgctgttcctcgttatgaagaactatccctgtaccctgcgccagtacctttgtgtgaacacacccagcccccgcctcgccgccatgatgctgctgcagctgctggaaggcgtggaccatctggttcaacagggcatcgcgcacagagacctgaaatccgacaacatccttgtggagctggacccagacggctgcccctggctggtgatcgcagattttggctgctgcctggctgatgagagcatcggcctgcagttgcccttcagcagctggtacgtggatcggggcggaaacggctgtctgatggccccagaggtgtccacggcccgtcctggccccagggcagtgattgactacagcaaggctgatgcctgggcagtgggagccatcgcctatgaaatcttcgggcttgtcaatcccttctacggccagggcaaggcccaccttgaaagccgcagctaccaagaggctcagctacctgcactgcccgagtcagtgcctccagacgtgagacagttggtgagggcactgctccagcgagaggccagcaagagaccatctgcccgagtagccgcaaatgtgcttcatctaagcctctggggtgaacatattctagccctgaagactctgaagttagacaagatggttggctggctcctccaacaatcggccgccactttgttggccaacaggctcacagagaagtgttgtgtggaaacaaaaatgaagatgctctttctggctaacctggagtgtgaaacgctctgccaggcagccctcctcctctgctcatggagggcagccctgtgatgtccctgcatggagctggtgaattactaaaagaacttggcatcctctgtgtcgtgatggtctgtgaatggtgagggtgggagtcaggagacaagacagcgcagagagggctggttagccggaaaaggcctcgggcttggcaaatggaagaacttgagtgagagttcagtctgcagtcctgtgctcacagacatccgaaaagtgaatggccaagctggtctagtagatgaggctggactgaggaggggtaggcctgcatccacagagaggatccaggccaaggcactggctgtcagtggcagagtttggctgtgacctttgcccctaacacgaggaactcgtttgaagggggcagcgtagcatgtctgatttgccacctggatgaaggcagacatcaacatgggtcagcacgttcagttacgggagtgggaaattacatgaggcctgggcctctgcgttcccaagctgtgcgttctggaccagctactgaattattaatctcacttagcgaaagtgacggatgagcagtaagtaagtaagtgtggggatttaaacttgagggtgtccctcctgactagcctctcttacaggaattgtgaaatattaaatgcaaatttacaactgccc

SEQ ID NO: 69 - DNA, 2680 bp, Homo sapiens
gagcaggctacagccccagggatccaggaggggccctgctgctgaggccgcgccctccccgccctgaggtgggggcccaccaggatgagcaagctgcccagggagctgacccgagacttggagcgcagcctgcctgccgtggcctccctgggctcctcactgtcccacagccagagcctctcctcgcacctccttccgccgcctgagaagcgaagggccatctctgatgtccgccgcaccttctgtctcttcgtcaccttcgacctgctcttcatctccctgctctggatcatcgaactgaataccaacacaggcatccgtaagaacttggagcaggagatcatccagtacaactttaaaacttccttcttcgacatctttgtcctggccttcttccgcttctctggactgctcctaggctatgccgtgctgcagctccggcactggtgggtgattgcggtaagatgccactttcctggcagcttctgggccctggcagggctggtggaagggatgggatggaggaggactcacttcccagcctctgccttccccttcctccctccctcccctgggcaggtcacgacgctggtgtccagtgcattcctcattgtcaaggtcatcctctctgaggtcagtggctcagggtctggccagtctggtgggcatcagacctgagtggtatgcttctagagaggagcatttctctaatttggggtgtctgtccctgttgtccgggttagggggagagggaatcctgtcctttggtatctataaggaatcatccttcacccgcttccctgacttagccccttgcagctctaggaatcagaaggttctttctccagcctaaccccagtttatcctgctgcagacttgagagggttcccaagcagctgctaccaggaatggggtgtatgccagtttggctggctagagttggtagccacagaagggggctctgggtttggggtgacccctgccatggagctcagccccctcccttcacagctgctcagcaaaggggcatttggctacctgctccccatcgtctcttttgtcctcgcctggttggagacctggttccttgacttcaaagtcctaccccaggaagctgaagaggagcgatgtgagtgcttgcgggtaggggggtgcagcgagggttacccacagccccaagagaggggagttgcgggcatgagagtcagtctgaagcatctcgccacctctgagcagcctccagtagcctgagggggagcttgggtgggggtaccccaggctgctagggtgtaactgtcctcggtccgggaccgagtctgctcctccagggtatcttgccgcccaggttgctgttgcccgtggacccctgctgttctccggtgctctgtccgagggacagttctattcacccccagaatcctttgcagggtctgacaatgaatcagatgaagaagttgctgggaagaaaagtttctctgctcaggagcgggagtacatccgccaggggaaggaggccacggcagtggtggaccagatcttggcccaggaagagaactggaagtttgagaagaataatgaatatggggacaccgtgtacaccattgaagttccctttcacggcaagacgtttatcctgaagaccttcctgccctgtcctgcggagctcgtgtaccaggaggtgatcctgcagcccgagaggatggtgctgtggaacaagacagtgactgcctgccagatcctgcagcgagtggaagacaacaccctcatctcctatgacgtgtctgcaggggctgcgggcggcgtggtctccccaagggacttcgtgaatgtccggcgcattgagcggcgcagggaccgatacttgtcatcagggatcgccacctcacacagtgccaagcccccgacgcacaaatatgtccggggagagaatggccctgggggcttcatcgtgctcaagtcggccagtaacccccgtgtttgcacctttgtctggattcttaatacagatctcaagggccgcctgccccggtacctcatccaccagagcctcgcggccaccatgtttgaatttgcctttcacctgcgacagcgcatcagcgagctgggggcccgggcgtgactgtgccccctcccaccctgcgggccagggtcctgtcgccaccacttccagagccagaaagggtgccagttgggctcgcactgcccacatgggacctggccccaggctgtcaccctccaccgagccacgcagtgcctggagttgactgactgagcaggctgtggggtggagcactggactccggggccccactggctggaggaagtggggtctggcctgttgatgtttacatggcgccctgcctcctggaggaccagattgctctgccccaccttgccagggcagggtctgggctgggcacctgacttggctggggaggaccagggccctgggcagggcagggcagcctgtcacccgtgtgaagatgaaggggctcttcatctgcctgcgctctcgtcggtttttttaggattattgaaagagtctgggacccttgttggggagtgggtggcaggtgggggtgggctgctggccatgaatctctgcctctcccaggctgtccccctcctcccagggcctcctgggggacctttgtattaagccaattaaaaacatgaattt

SEQ ID NO: 70 - DNA, 2266 bp, Homo sapiens
acgtggtgcacagcctgcccaacctcaccgcgctcagcctctcgggctgctccaaggtcaccgacgacggcgtggagctcgtggccgagaacctgcgcaagctgcgcagccttgacctctcgtggtgcccacgcatcaccgacatggcgctggagtacgtggcctgcgacctgcaccgcctagaggagctcgtgctcgacaggtgtgtacgcatcacggacactggcctcagctatctgtccaccatgtcgtccctccgcagcctctacctgcgatggtgctgccaggtgcaagacttcgggctgaagcacctcctggccctggggagtttgcgcctcctgtctctggcaggctgcccgctgctcaccaccaccgggctgtcgggcctggtgcagctgcaggagctggaggagctggagctgaccaactgccccggggccacccccgagctcttcaagtatttctcgcagcacctgccccgctgcctcgtcattgagtagcgcgaggcccccgccccggtcgcgggaacccggccatgacctgggcgggggcgcggggcgccgccgagccccctcttcccgccttgcgctcgggggagcctccgcgcccccggcccagcgcgggaggcggggcgagccgagggaaagcccctccccgaccttcggtccctccgccctcccagccccgccccgggcaggggggcggcgggtgggcccgccccacgcacgcacgcacactcggggactttgtgcatgcccctcgtgcccgcactgcacgccgccctccgccacgccacagccacagccgccgccatcactcgctcgccctcccgcttggggggcggggctcggtccttgggggggctttgagctctccagactgtgcccttaccgccttccccgccacacccgctctgtcttcccactgtcccccccatcccgggcagggcccagtgggattgagggggctgggtcccccaggacacgggcccagaagagccccacgggcttcctgcatcttccaccgcaccatacctggagccctccgaggggtgtcaggggaaacaggccaccgccaaagccatggcccgccgccgagagccaggccccacccgcacctcctcacccatccagcctgacccacgcggcctctcctcctccttgccgctgtgtggggcagtcccctgtccgccccaaaacccggccttggtccctggccaggctgagagaattgggcagggagagggcggaagggctggcgatcgcttggagtcattaacgtgatcccagctgactccggtcggcctcaacccaggggtggcgcaggcaccttgcaagcctcgagctgtagccaccctcaggcctgggaagaggcctgggccgacctcacacctcagcccttgcacccggccgggctcagttcaggcctgggcaccgagcttcaccctgggtgggtctcctcaggtggagtctgcagagtggacccagccaagggtcagggtcagcactgggtcagcgactccaatcttccagtggccagcacaccctagacaccccgaggagggagggctcctttctagcctgcccccccacccccacttcacccctccccagcttcccaaacttctgtctgcccaaatgggctctgaccgtgctctgtcggcccgagacatttggaagtcctgggggatgctggcaaatctcagctgttgctgaggaggggctgggaccccttcccatcccaaccttgagccccaggagataccgcgcccacacccaatcttgggacactccctatctggttggaagagagtaaccagtttccagagagccagagagtgagagagagaaagagagtgagagagagagagaaagagagagagagatgctgttgaatcagaaacagatcaacagcccaaagattttcctgtccctggagtgccagccccaggaagctccagggctgagtggtcaggagccagtttctccagcccctcctccccacaacccctagtggggaggggcagctgtccatttgcccaaagtattaatgcaactgaagctgtgatatttccaacgactgtaggaggaaaaattaaggggagagaggaaaacaaaaccaaccaacccctaaaatcattttcttattgtacataacgacctcattctcctgtatatgcggaagatataaccttatatttggtaagtgtttcttgtgctattttatcacgtgacctgtttataaaaatatatattaaaaaagttct

SEQ ID NO: 71 - DNA, 2102 bp, Homo sapiens
gttggaaataataccatccatgtgcaccgagaaattcacaagataaccaacaaccagactggacaaatggtcttttcagagacagttatcacatctgtgggagacgaagaaggcagaaggagccacgagtgcatcatcgacgaggactgtgggcccagcatgtactgccagtttgccagcttccagtacacctgccagccatgccggggccagaggatgctctgcacccgggacagtgagtgctgtggagaccagctgtgtgtctggggtcactgcaccaaaatggccaccaggggcagcaatgggaccatctgtgacaaccagagggactgccagccggggctgtgctgtgccttccagagaggcctgctgttccctgtgtgcacacccctgcccgtggagggcgaagctttgccatgaccccgccagccggcttctggacctcatcacctgggagctagagcctgatggagccttggaccgatgcccttgtgccagtggcctcctctgccagccccacagccacagcctggtgtatgtgtgcaagccgaccttcgtggggagccgtgaccaagatggggagatcctgctgcccagagaggtccccgatgagtatgaagttggcagcttcatggaggaggtgcgccaggagctggaggacctggagaggagcctgactgaagagatggcgctgggggagcctgcggctgccgccgctgcactgctgggaggggaagagatttagatctggaccaggctgtgggtagatgtgcaatagaaatagctaatttatttccccaggtgtgtgctttaggcgtgggctgaccaggcttcttcctacatcttcttcccagtaagtttcccctctggcttgacagcatgaggtgttgtgcatttgttcagctcccccaggctgttctccaggcttcacagtctggtgcttgggagagtcaggcagggttaaactgcaggagcagtttgccacccctgtccagattattggctgctttgcctctaccagttggcagacagccgtttgttctacatggctttgataattgtttgaggggaggagatggaaacaatgtggagtctccctctgattggttttggggaaatgtggagaagagtgccctgctttgcaaacatcaacctggcaaaaatgcaacaaatgaattttccacgcagttctttccatgggcataggtaagctgtgccttcagctgttgcagatgaaatgttctgttcaccctgcattacatgtgtttattcatccagcagtgttgctcagctcctacctctgtgccagggcagcattttcatatccaagatcaattccctctctcagcacagcctggggagggggtcattgttctcctcgtccatcagggatctcagaggctcagagactgcaagctgcttgcccaagtcacacagctagtgaagaccagagcagtttcatctggttgtgactctaagctcagtgctctctccactaccccacaccagccttggtgccaccaaaagtgctccccaaaaggaaggagaatgggatttttcttttgaggcatgcacatctggaattaaggtcaaactaattctcacatccctctaaaagtaaactactgttaggaacagcagtgttctcacagtgtggggcagccgtccttctaatgaagacaatgatattgacactgtccctctttggcagttgcattagtaactttgaaaggtatatgactgagcgtagcatacaggttaacctgcagaaacagtacttaggtaattgtagggcgaggattataaatgaaatttgcaaaatcacttagcagcaactgaagacaattatcaaccacgtggagaaaatcaaaccgagcagggctgtgtgaaacatggttgtaatatgcgactgcgaacactgaactctacgccactccacaaatgatgttttcaggtgtcatggactgttgccaccatgtattcatccagagttcttaaagtttaaagttgcacatgattgtataagcatgctttctttgagttttaaattatgtataaacataagttgcatttagaaatcaagcataaatcacttcaactgc

SEQ ID NO: 72 - DNA, 731 bp, Homo sapiens
aaaagatgacaacagcagccaggccaacctttgaacctgccagaggtggaaggggaaaaggagaaggtgatttgagccaactttcaaagcagtattcaagcagagacctaccctctcatacaaagataaaatacagacagactactcaggatgcccctgaagaggttcgtaaccgtgacttcaggagagagttggaagaaagagagagagctgctgcaagagagaaaaatagggatcgtccaacccgagaacatacaacctcctcttcagtgtcaaaaaagccacggttagaccagattcctgccgccaaccttgatgcagatgaccctctaacagatgaggaagatgaagattttgaagaagaaagtgatgatgatgatactgcagctcttcttgcagaactggaaaaaattaaaaaagaaagagctgaagagcaggccaggaaggaacaagaacaaaaagctgaagaagagaggattcgtatggaaaacattctgagcggaaaccctctccttaatctcactggcccatcccagcctcaggccaacttcaaagttaaaagaaggtgggatgatgacgttgtcttcaagaactgtgcaaaaggtgtagatgaccagaagaaagacaaaagatttgtaaatgacacactgcgatctgaatttcacaaaaagttcatggagaaatatattaaatagtacagttttatgtgcttaattaaagactgtaaaacg

SEQ ID NO: 73 - DNA, 1165 bp, Homo sapiens
tggagaggcaggaagaggggcctgagggcggaaggggtttggggctcccatttcgccggccagtccctcctcctcagcctggcagtggcgctgggctccttcccctgggctgtactgagccgagcccaggggtttgcagagggtgggggtccatctctccagcttggctgcagacctcctttaccctgactcacaagccccactgatgctctgggccatgccggctgacggctgctgtggatgccgcgagggacggacacacgtccggggcacccacgaggagggcccccagcctgggagactggccctgcggcctccacgtcaaactctcttcccaaagcccctaacagaccagtggccgaggtgtggctcttattgcatccatccctgaagatgtgtggctgttgctgtcaccattggagtccttttggggccaagatgtgtgtgcacccggggtcgtggccattcactcccaggcaggggtgagggtggcctggcccaggaggccaggaaggagggccctgtctgcctccacctctgggtgcaccccctgcctaccaccctcccttctagagagcacatcgcctgaccggggagaagtggggccgtggttcgagggagggctggccaggggtgggacccttatgagactcagtctgtgagtaaaactgggggctcaaatgcccaggatgaggggatcagtgactgtctaggaggatcccttgccttgtaggtgccccaagaccgcagggtagaaatcagccgggatgcctgcatcccacccccggccccagggcccaccacataaaatctgggagcccagagctgctgaggtgtggtcagctcccctaaaatgggcacggcccagcctgtcccatgaggaataaaggcccctggcccccttgagagagggcttgttggtgagggctgactcctgggggcccccaaggctcccctcctgtggggaggccaccttttaaggcaccactagcagtcaggatatggtggcatcagccctggggcctcctgggtggcaggggggcagcagctctcctccccactcacaggccctgcagtgctcatttggaattcctcccaagacccctggccacccagaccccccattcttcctaacactggcaataaaccctcaactgtgacccac

SEQ ID NO: 74 - DNA, 1808 bp, Homo sapiens
  misc_feature 1773: n=a,c,g, or t
tggctttgcttgcaattaagcatttaagtgcccatgttaaaagagccagaccgcactgattcacatgagcgttttgctgacatgatgggcaactgaagtcacccctgttgcccatgcactggaaaaaaagttgaatttgttggatattttctggggctgatgaacgttctgggatgtgctttcagtcctcgtattacggccagcaccttacactgtctctgtgaacggggccaagccatgatgtgccaacaagtgtcagctttgaaaggtgtttgtctcccaatcggggtgactcccctgctgcctggcagcatgtcgcagatcagcacagagtggggccgtggttcagcagtgacccacagaatggctttgagcatcagtctacaggacaggttggaagcatccactgtgaaccaggcattagtcccctacctggcctgtgtgtgctcagtagagaaggagagggacaggccactcccagactgcccagcccaggagggttaataaattgggggcgagccaacctgtcagtgcttcctgaatgccccagcctctgtattggtgcgttgggtcagtgacattttctaaactctcctgaaaatccagctgctcctccctgctgcttgggagttcacccaggagaggaaatgggtgtgttttgttaaggtcccttgtggagactcagggctgaatcctgcttggtaatatcagtgtgtgtgcttggggatggaccttctactgaataaaaactccctccctccccccattgtggtcacatatcattctacatatctcatctctgagcatctccatggaagcttgatttttgttctttttggtttctttatgtatttttttctgttgttattattttttaatgttcaaagactagcctttccctttgggattccaaatgatcccatgctgtggtctgaggggcaaagccacctatgttggcgctcgccattaatccccagcgctcagtttagaggctcacgtgcagacatcagaggctccatgctgcacagtagctcaggcagggtagtgcctctcaacccagccacaaaactctccccgctggagtcccagatggcgcttcacaccagggcagtggaggcaggcatggtttttgggcacagggcagagcataaggatcccaggtcagtgtgggagagctactggctcttaggatcaccttgggcagaagtcacacggcttcatcctaggagggcccagcttgggagtctgcctccccctgatcccaggaccacccacaggagaggggcagtgtccatctttctgaagggaccctttggagatctcgtcctaagtgtggagaggactgacgtggccctgtcatctcaacacatcccagggtcaggcaggcctcagctgaaacaatgtcagggtcctcaagggtcccatttagacagacccacggcttgtaacagcgcgctcctcaggaggcagcactagcgcatacccactccccacggacactgagttcctggtgacagctgcagccccagccccgccaggagtcctggagacagcagccctcagagaccctgcaggagtgagtgcaccccaccttgctcagccacaccccactcccctgtgccctgtagttgtgctgcccatgctccacacaccatggggcccctttgctcatttttggactatttatacagcaggtttggatcatgtttttctactaataagaatgctaacattgttgtgtagataatcagtgagggctttatgaagtttacncctttgcattattaaaggaaataacagttcatgcg

SEQ ID NO: 75 - DNA, 2670 bp, Homo sapiens
  misc_feature 2630,2634: n=a,c,g, or t
ggtaagcggaatgtgctcatagaccatcagacgcttgtcgaaggcaggtcctagtcatgtaattgcacaggacaaggaggtcagcgtgtgtgatggcagcatgctgtgccggcacatcgtggagtcctagaaactctctagtccctgcggctgttcccctcctctgctctctccctggagaggactgccagctcttaagaaacattcctggtgcggtgtctgcagtgccctttgtgggtgacttcaggcttcccgctttcgtggtgctcttcctgggattcgtttttttattaccctccctccctacttgtaggcctcagctatggcttgacgtaatcgcttttagacccaggttggcttcccttcattaagctatgatcctccaccccattttttttttttttaatttggagtgggagggaggggggtgggcgagagaaagctcgaaaggtattattggtttttcaaaaaattagaggtgacgattctaccagggagttgactgataggagtgtgtgcagggcaggaaaggttcggaggcacccgactaccaccactcggaaagccgctagtccagatcgactagggagaggcttagatactttagtgtatttaaagagcatttcagttaactttttcagctatttttaaagtttgtgaatggagtgttattttggacattcttaaatatgaattctccaaaggcatttagccttgacttaatattaaatcctaaggattttatgtaaggtttttttgcaacctatttaattttttttaaatgcctaacttctgaggtgcataagcccgtggtttgtgtactggaactaaagcggaactcactgattcatattggatccccaggtataccttctgctggtagcatatggctggaaaaagccgtttgcctcacacattgtaacctgccttggctagaaaatgcttttaatgtctcaactctctcttttctgtgtcatgttttggtaggaaatctttaagattggcggacggaacaggtattttagtgagacacttctgagtacttgctttttcctttgacttctaaccaactaaaagagaaggaggtcttcatgttgatattttgcttggttttattttactgattttaaaaggtatatagaaaaatgtaggcctttaaaaagaaacagcatgtagttttttattttaatatgttccatagagtggataggcagacaggtctattgtaatgtattctgtatttaataatttaatatactctagaaagtagacctcatgcattcttttagcatgattttcttttaaactgcttttcattttaaagggcacccgtgcggaagctggttttgcaaggactgtgtaagctgtatgcgttctagctgtatgcgttctgtagtcttttcttaggtgggtaacattttcaataacgcgcgcacagcacacaggggtgccctgagccgaaggagcaaaaaaagccaccgctcgtttctataatccagcttgcttttcacaggcgtgggatccaggatggtgtcctctgtgaggacttgaactctggggctttaattccactgtttaattttcaggtaccacagcagcaaagcacagagtgtgacctttttcatgtctgagctgattctgtttgctccacgtgcctgcttcttgctactgttcatttagtaatgggatcacctcaccatgccatgctctgggctctccctctctgtccatttctgttttgctttcctggctaaacccatctaccattcttaacactggtagctcctgtcccattccaagactcactctctcagaccttcccatctccctggctttccatgctcctctccctccacctcctggcttcaactgggtgagggccgtattcctgccactctgctccgcctcagccttgagaactccacgtgggctgggtgggaaggtgctgacgattttcacactgtgtttacctctccatcacctctcaacctttgcttcgacaggtcttcactcacgatttattcctccaggtctttgattggagagagtaactttttaattctgttgttttgcagtttggctctgtaggagtgagtggcgattcaaagatgccggcgtcccgcagtgtgcggttcgtgcccttaaccacccgcttctttgtttcccgcccctctgctttcgcaggagctcttgtgcttgagttcagtgttagtggtagcgtggctcactccacttggaggtggcggccgtctgaccgtgtgttactgctttgccgacggggcctcccggccctgatgcgtgtacactctgcgggctgcaccgggtggctctggttgggggcgaagctgtgttgactgggagagcgtggagaaattgagacagggagagatgacgggagtgcgtttctctgggtttgatctccatcctgttttctcccagacacaccacacctaccttgggggaatgccgtcgcctgttccacccctttgttcacttcgcgttaactgctgtggtaactttttcaggatctgtgtgaagaatggtaatgacgtagttgaaaggaaaatgtactgttgtgtgtttcatttgtgtgatttcgtaccaaaaaaatgtgtttgaactatattgtntgtnatttggaagtcgtgttaataaaaccctgcagtttct

SEQ ID NO: 76 - DNA, 1976 bp, Homo sapiens
cccctctccaggcctatgtgtctgtgaagtgagggtatacacactggcatgctgtaagaacaggagatagcagagtgctgagtacacagaggtacttaaaggtgggagccattactttcgccatgagtcaagttatctttggctgcgatcattgatgtctctctttcctgctcttttacctcagctgccctgtgagctacaggacatggttcggaaacatttgcacagtggtcaagaggccgccagcccaggtcctgctcccagcctagccccaggggctgtggtgcctacctcagtcattgcccgagtgttagagaagccggagtctctactgctcaattcagcccagtcaggcagcgccgggcgccccttggctgaggatgtctttgtgcatgtggacatgagtgagggtgtcccaggtgatccagccagtcccccggcccctggcagccccaccccacaacccaatggggagtgccactctctgggtactgccaggggctccccggaggaagagctgcccctgccagcctttgagaagctgaacccctacccaaccccgtctccaccacacccactgtatcctggccgcagggtaatagagttctctgaggataaggttcggatcccccgcaacagccccctgcccaactgcacttacgctacccgccaggccatttccctgagcctggtagaggaggggagtgagcgggcccgccccagcccagtgcccagcacccctgcctcagcccaggcctcaccccaccaccagcccagcccagcacccctaacactcagtgccccagctagctctgccagctctgaagaggacctgctggtcagctggcagcgggcatttgtggaccgtactccaccacctgctgctgtggcccagcgcacagcctttggacgcgatgccctccctgagctgcagcgccattttgcccatagccccgctgacagagatgaggtggtccaggcaccttctgcccgacccgaagagagtgagcttttgctacccacagaacctgactctggctttcccagggaggaagaagagctgaacctgcctatcagtcctgaggaagagcgccagagcctgctgcccattaacaggggcacagaggaggggccaggcacttcccacaccgagggcagggcctggccactccccagctccagtggcccccagcgcagccccaagaggatgggggttcaccacctgcaccggaaggacagcctgacccaggcccaggagcagggcaacctgctcaactagggcccctgctggccttcctgccattgctgcaccaggactgcaaggagtccccacaccttggcagctcagggtccccagtccaagcccttgacctctcctctatccagacccgcacagctgtttcctgtgtggatggggtcaggttgtgggccatgccaggcctgtcagctgcgttgactgactgcagcagcttgcctcatggttttccctttttcttagaatatttattcttcagaggtaacatgcagttgggtctcaagacctttcctccaatcagcccaacccagcccagactgggcttttctggggagctgaggagtttatcagtattcatcttccatcctttcatagtcacaagttttgttattttgtttttttttgggggtgatggtgtaattgttaacctcatttccgtttcctacctgtttgcttccccccccagtcctccgcatgagctgttgccctccaggggcctggcacagctggccttggggacgagggagaggactgattcagggccccctcagctgtctcctccctccctctggaaaggagggtggggctcaggggcctcaagctgggctctgtgtgaggcctggcccccactcccaaccttggctctagactgttactcttaagctttgagaaattttcacattgatgactattttaaaatcaaataaaactattttactgg

SEQ ID NO: 77 - DNA, 1874 bp, Homo sapiens
ggcactacaaggttggcatccccccgttcttcacacatccggcctgtcctggcatctgggtggttctgtagctttgtttccccgtagctagccggttccatgatgtggggcacaggaaagcgagttttcgccttgcccaccctcaaggccgagctgtgccctctgtctgcccccagctttccccttctgggtcagcctggacggcctctcacaggtttcccagcaagtgccatctatgaaaggctcgtatccgctagccgtgtaggtctggttggatttgagcaggtgaaggattacaccaagtggaaggaggcctgcaggagttgctgccggtcccccgtcaccactgtgggactgttagacctgcaaggcagacccaccctcgtctggaatgaggtaacaccaagaggtgtggccagtgcacagaaccatagactcaagctttagaaagtggccattgtggccggcccaggagcagtgggcactgagaggtctcagcctctgtgggggtcgagagaggtcgtggtgtgcctgacagccccgtcctgccggaaagcaggggtgctgcctggagatgcggcgggtctcactgatgtcttcgtcagagctccgtggagagcccctggttgcaggcaggacagcaaggctgaggggtcacacggggccacatctgctggtgcccgtcgtgctcctctgcagcaagcccagcctggccattgctggaggtcctggagcccacagtgccttggccttaaagagctcacttgagaaacggcttgttccggtggggtggggggtggattgaagactctgagacgagcagggaactcagaacactgagtccctatttgatgttaaaatatgaccgttaaacttctgggtaagataatgaatggcactatggtttatactgtttctgttttatgggctcttccagagacgtgaactggaaaaggctctgcagtgtctgggattcgctcagtgctgcaggggagggcaggtgtgaggggaatggccctggagggtgatggggctggggcatccgatgcagctttatagttctgtaattaccacttttaaactttttattacgaaaaatgtcaaggaccctggaattacggtgaggtaggcaggataatggcccccaagatgcccgtgttgtgacccccagaccttgtgagtgcctcacatggggagattgtcctaggtcatcttgcaggcccagggcagccccatgggcccttaaagcttgagagcctttcctgctgagtctgagagatgccagaagcaggagaggttagaacccgaggagggccgcacctgcgctgctggccttagaggagggccgaggagtgtggtggcccctaagcagctgggactggggacctccgtcccagccctgcaagaaactgaattctgccagcagcccccatgatggaggaaaggaaggatcctgccctgccagcaccttgacctctgacctccacaattgtaagcctgaggttttgtgtagtcaccatagaaaactcacacacataagaactctgtactgattcaacaatagaacatgtcacacacgaactggaaactgattctgtgggcgacaagagtctatagtaaacgttatgacagattctttgaatgcgctaatctcagactggactaaagttgggattaaatttaatttgtacttgagttcagtgcattgctgttctgggcataggaaatccaggttgctggtgatgaacagctgaaaagagctgtgtcaccatggttgtctctgtcagtcatgtgaccacccttacccttgtaaaatcaagcaagggagagattattttctaatgtaaatgaaaataaaaaataaagcagcttgc

SEQ ID NO: 78 - DNA, 1746 bp, Homo sapiens
tttttttttttgaataatctgtgctttaatggaaaaatgaagcattaatttgtttagtttctcatacaacatgtttactaaacatttcagtgtcaataatttcttaagattgtaacatttaaccttgtattggagctaataccaattctagccatgggagtatgttttggactttttgaacaattttgagtaaaatgaatgtcactgtctttaaattgtacttggagcaaagacaaagaaacatcagctcattctttccaactaatagaacatttaatgatgcaatttttattacattattttaaggctattatcataatgttaaatattcttatttttttttgcttccgtctgttactaaagctcaatacatcattctgaacattattaattttcacttaacttagatttaagtattgaatttttaacttgggctccaggaaaaatcctgaaaaagaaagatcagcatctagcatccttttcctattctttcaccacaaattctcaatttgatatgacttatcatgaaatctgtattgggaagtatagatttctaagataactttttgtaactaaaaaataatttcctgtgcatcacaagggggattaaaaatcaccaaagtactgaaggaacacgtgctttgattattattcccacctgtttcttttttattataaagtggcaatttgtaccatcattagaaatgtacattaatgtataaagttttgcattcaaatctctttatttttgattacctatgactaaagaccacaaatcaaataaaaactcatataatatatccttatttcagaagcatatgtatatatacacatatatatttgtagaacaatccactgttttaaatgtaattttgacttaaaaaatgctatttacaattttatgacagagaaataacctcagccttttatggtattaaaatgagcagggaatttttatgtttgtgtctcatcttgtgcagatgaaattaagcaatatcatggaaaaccttctcaagagcaaggccttgtagactaaggtatgagggtgaaatcgatttgctatttctgggtctatgtttttaaaaaattactggcaacgtagtcatacttacttcttcaccaagaaatcagtgctcccaaattaggaattccaaacttttcaatatgcaacctttaagtctttccttgtccttactcttgtcttaatactctcatctcccactagtggcaccgcaggactaccaatctagatattagattgttgctattttattaaacagaagagtcttagttcttttaaacaagctttctgaattagaatgaggcccataaagcatcacattgcattacattgatatctctttattgcgccaatccataatggctaaaaatgtgctattaaattgtatgtaaatttcaaagccaaaacgattactatgagaataggatggcttgctgccctccaatttgcggaagcacaaaagtctctgaattagcaaatggaacttcagctccatttgtttctatactttattctgcgagcttaaaaatcaagtaaggtgtattgaccagaaagctattttgtgagactctcaaaagttttgttttcattcttaagctcgttgattttgaaacttattccaataagaactcagaataaacatatcttaatttatatctgcgtagccaattgcaaagcattactaaaagccatattttttcctgggaaaaatcccaatgcaactc

SEQ ID NO: 79 - DNA, 1133 bp, Homo sapiens
gccaaggttaaccccaggccgaatgccaggttctcttttccaggttctagctcaaccctgtcctgtgctccagcactttcagtgataggcagcccactccattttgaggcaatccatcttattgacttagggttctagttaaaagaaatgtaaaaaaattaaagtcaagtttgtctcttagtcactatcattcaccagcccttttctgaacttgtacaaaataagttcattctctcttctacaggagagacctccactatccaaatatgaggagcttatcatcccaaggctccaggtcttctcattgctaaatatagcaccctgggctaaatattcccagggtgctcagctgtttctcaaatgcagaggaaatgcccgatacaccattctccttcacagcatctttaccaccctgccacttggcctttttgaacccccattagatggtgagcattttccttatctgattgctttcccctgtcactgggctgtcaatgggactcttagaattggacttagaagcacgtgggctccccgacaatgatctggacagccttgctttgaatatagtggatcttttgcttttcttgctttgcttgcagagctcaaggaaacatattttctgatcttgtcatcttttgctaaaacatactgaaagttaattaatagtcatggctgtgaaatcttttctctggtttgtttctgccttatactgatttctaaactatttgcaaatattatttttgattgtaacagtatgaaagggattgagagtcctgcctacactgacttataataaaagatgccatgaatttacctgagaatctgagaaggtctattgctctcattctttaaaaactttttttttgttgttaagtatctgctttatgccagtcatccattctcagcacaagagaaaaagaagcagtgataacaacaaagattcttttaaccagaatagaacttacaattcagttgaaggaaccatacaataaacaagtaaacaaatatatatatgccatagcattaagtagtatttgaaaggttttattcagttctgaggagcagtaactcatgttatggatgaatgattgaagttcaggtattcatttgtggtgaagaaaaataaagat

SEQ ID NO: 80 - DNA, 1685 bp, Homo sapiens
atttattagaagacaaataaatgtttatattcatataagtcaaaatactacatcaaattttacatagtaaaatatttatgatttatgtgcaacagatatgttatgtaattatttccctttatctcttttttttctcattatagaacagctgtcatccaaacattttgatggaaacttcacttttattaaggaatatttttaacatatattcttataaatattttagatctagcttctaacataaacataattgcaattatatctcaaacttaaacaaaaatattctagtatattcaaacatttcattagtatttaaactttcaatcttcctgtaagttctatattttataaaatatatattaaatttgaagcatttgttttaaaaggatccaaataaaattttcatattgttagaagttgataggcttaattccatgtgtgtcttttctttttccttggaatgtgtttgttactgaaactgaatagtttgtttttgtagttttctacagtatgtttcagtctgattgcatcactgcaatggtgtttaacatgttccccttttctccctatattacctatttatttgtagttgtagtcaagaaatgaaagaaggccaaatttaattgactttgttttggtttcattttgatacagttatgttataggaagaactggtttgtctctcaaattttcttaacagtactttattcatatgtactttacatattgagcataaacattaaatatacagtcccatgaactgtgatacatctatgtacctgagtaagtaatatccagatcaggatatagatttctattactccacaaagtttcttcatgctcctatccagacaagcccccatctccctgctcactacccccatgagcgaccactatgatttttatcaccatggactgctccttaacttgacatgtattcttttgcatctgacttctttcttccctcaggcttttgagactttcccatgttttaaaagtattgatagtattttttcatcaaattatttccccgtaagaattagatcacaggttgtttttcctgtctcctgttgatgaacattgatgggattttttattttgggctcttatgaataagctgccgcaaatatctttagagaagtcatcttatgtgaaaaacgcattcacttttcttgcagtcaaatgtcctaggagtagaattggtgggtcataggatgacaactgaaaaagaattttccatcttgattgcactgttttagactcctaccggcttcgtaggagagttctcgtcgtaccacactcttggcatcacttgttattgtctgttttcgtaatggaacgtttgggtgggtgggctatctcattgaagttttaacttgcagttcatctataattaataatgtgccatggagatactttcttattatgtgccactcagctatcttcttttataaagtgcctgttaaagtctttagcccaatttttaaaaattgagttattttctctcgcttgtaataatttgtgggtattttcaaaactattttctagatacaatttcttgttcagtttgtgtattgtcaaatatattacattattaacctgcctgtacagagcagtagtttctaatactgataaacttttacctattaatattttttcttgttcttaacacttaaatcttgact

SEQ ID NO: 81 - DNA, 2460 bp, Homo sapiens
attttgacaaatttagtgtcttgtgaccatcaccaagatcaacctgtttttaaccctccaaaaaattcccttctcctgccctctttccctggcaaccctgattgattatctgatcctataattttgccttttctagaatgtcatataaatggagtcacactgatgtcgccttttgagtctggcatctttccctcagcttaatgcttttgagtcattcatgatgtgtgcgtgtggtttgttccttctccttgccgggaagtatttcattgcatgggcgtactactctgcttctttatttttacactgagcctttcgccctggaagttcttggcccagggtcttcaacttgtttgcacgaccacttccagcttgctgcttccttcagttccccaggctcctcctccaaatgccagctgtgcccacaagctgttcttagggctcacactcgccttttggcgcgtggtgggtttttggtagtgcagaaagaatccagggatgggaggggaagggacggatgggtgctcaattgctgctcacgtctgctgcaacctgaagcttgcatctcagccagcagatctgctcccttctgggacccaggcttcagtgtcacacggtccttggctatgtattgggcgttggaggctttgaaaggcgagcagaagcagcatggacaagaaggctggggctggccctggggctcatcatgatgctttcctggatctgttgcttcatctgcaagctgagggtgtttgttctagatgagtgtctcaggccaccggcaactgcatgtacctcctccctttctcatttccaatgatgtaccctgtacacgtgttcatgctgtgtctggctctcatctgcacaatcgtgcatagaattgcctcaagtcctggtgagagagatgccgtggtacttttccatttagattcaaatggagctaaaattaagagttttatgagctgttaagaatgaggtagtttttcctaggacccccaaagacagtgcaagtaatgaccgtttggatctcattcgtcgatctttgatagtatgttctggagtctacttccccaggagcaggacaggcgtaagatggagtccttgtcgcagtggagccttgcctagttggtgatcacacagcctggcctgtacctgcaccccactggatggtggtacatggtggcagggacaggaccacacccagttaaggccagaccaggttgagtgtgacccctgaggtaaacactccactaagctgtgtcttgttcatgccccctgctcagtgaaaggtgagtcccgagaccagttgggtacctctctatgcgaaccagagacatttctggatccaggccaggtgaagattagggccaggaagcctgagcccccggggcctcaaggtagggagccgaagaggctgccaggactctgctgggttgaaatttgccggggaggactcttgtctccccctcaggagtatttttgttgaggctttcctggaggtgaagaagcaattcccattgcagcaggttagagcgagaatcagacagagggcaaaaaccaattcgcttctccccacgttctaaatgctggggcatggctgtcaggagggcttcctggaaggtgtctctgggggtggggtaaggttggggcgatgccctttggagattgcgtgtggtgttcaaggactgttccttggtgtttgagggaaactttagtgggattgcagtggaatgtaaggtcagggcacgtgggtgctctctcggggtggggtgactgggagacctagagggaaagcctgctatgcagggggagagcacaggactggccctgctctgcggcctcctttgtcccataacctgaagttaagtcacatcccctgtcgggacctccgtgcactcatctgtcaagtgggggcgcttcccttccagcatcacctgcagcagacgggctctcgggagtcgtgggttccaggcagctgtgtggacccagggacagacattcaaagggacgccagccatccttagtgacaggggccccaacttagcatcccttcccttccgttaggaaggagatgaccggaagcaaccccttcacagacacgagcacatcggcaaaccctatgaaagtggaattttctaacaaaataaacttgcttgtttgatctgttttctgtaacttttgctaaatactttatacatttttcatgttaaagagccgtgtctcccgccagcactcctcaccccggtatgaatgtgtttcctccacattgtatatccttccaccctctggctgcctagatcagtaaataaaattgatgtaatataatttataagtaacactgttgaaaccctgatcccagtggaggctgtaacccacctgcccccgcaccacccccctgacccctgttaccgcatttgtgtgtattaatgctgaagaattaaatgtttaaagagtttaaatttc

SEQ ID NO: 82 - DNA, 2027 bp, Homo sapiens
ctccgtctcaaaaaaaaaaaaaagagaatttaaattgacacctgggctcccattatgttcctatggggcagcacttatctggaaggacacgggctttgtaacgctaacctccagcagggcctggggctggggagaaggcgacagctcttgactttctctgcttctgtgttgaatttttttcatagcacatgttcatggataatgaaagtgggtaaattattttgaatttttaagcatttggcatagttggccaggaagtctcacccccaggaatgtggtttatagaaattcctggagctcacaaaaatgtaggtgcagggaaacctcagggagtcccccaaaatggggctgcagaagaatgttgatgatggtgtttaaggtcacaaaactgtgagtctgtgatcccattttgatagaaaaaaatgcagtgagtcacatgtctacaatatgtgacataggctgagaaaggcaagagaaactggcacggtggtagactgctcggaaactcgcgtggcgggctgctctcggaaactcgcgcggcagtgggctgctctcacagactcgcgcggggagtgggctgctctcgtctgtaaattttccacattgagagcaccaactgctcagcttcagagaggagcctgggcggcaggtgggaccctcactccccacggtgtcctcgctccggctcagtctacttctcaggccctcccacgtcctctgtatcttctgcatgcggaaagccccccaggtggacgttttaagttatctttatgctgagttaggaagaggcccttgcgttgcctgcagaatatacctgctcggggtagggctcactggtgatgtcagagcgtctgcaaactcacatattttgtctttatgacttaaggctccacgctctgtttcttcgtccctcgtaggctcatcggaacctgtcccagctccctaattttgccttctctgttccactggcgtatttcctgctgagccagcagacagacctccctgagtgtgagcagagctctgccaggcagaaggcctctctcctgatacagcaggcgctcaccatgttccctggaggtgagtgagcgctgtgtctcgcctggggtaggggtgtgtcctgtcagccgtgggggctgctcttcctggtggtggaggccaggtcccagtccttccccacacttgtagaaacatgcattctctggtagggcctgcaaacctgccctaccaaacctgaaagagggtcggctcatctcggaacccgctgcgtgccaagccaggcacgaggaggtggcaggcatcccgacccccgtggggcctgtgttctagagtgcagagacagaactggctgggaggtgcggggcattggattgtaccagtgctgggaaggagagcaaagcaggggaaggtctcggcagcgccgaggtgtggccgagagggttgtgctctgcaccatgctgggatgcagaatggaggcctgtgccgcccagatggactcagcctgcacagccgtgacccctgactgcatctgggtagcttcgatccacgcacatgtggcgggcacagtgaggctgccacctggtcagacctcggggctgaccctgcctgacagcatgtgtgaaatccctctttaagatgggcctcctccgaggagctgtgaggggtgagggtgaaatccctccttaagacgagcctcctctgaggggctgtgaggggtgagggtgaaatccctccttaagacgggcctccggccgggcgcggtggctcacgcctgtaatcctagcactttgggaggccgaggtgggcggatcacgaggtcaggagatcgagaccatcctgactaacacggtgaaaccacgtctctactaaaaatacaaaaaattagccgggcgtgttggcgggcacctgtagtcccagctacttgggaggctgaggcaggagaatggcatgaacccaggaggcagagcttgcagtgagccgagatcgcgccactgcactccagcctgggcaacatagtgagactccgtccc

SEQ ID NO: 83 - DNA, 2111 bp, Homo sapiens
gcccttcctgttctatgttatgacagaggcggacaacactggctgtcacctgattggatatttttctaaggaaaagaattcattcctcaactacaacgtctcctgtatccttactatgcctcagtacatgagacagggctatggcaagatgcttattgatttcagttatttgctttccaaagtcgaagaaaaagttggctccccagaacgtccactctcagatctggggcttataagctatcgcagttactggaaagaagtacttctccgctacctgcataattttcaaggcaaagagatttctatcaaagaaatcagtcaggagacggctgtgaatcctgtggacattgtcagcactctgcaagcccttcagatgctcaaatactggaagggaaaacacctagttttaaagagacaggacctgattgatgagtggatagccaaagaggccaaaaggtccaactccaataaaaccatggatcccagctgcttaaaatggacccctcccaagggcacttaaagtgacctgtcattccgagccagcgaaccccagcagtaggaatccgtaccctagggatctgtctgtcatttctctgttgctcttgtgattggcaagtacagtatcctttgggaaggccatccccctcaggactgtcctggctccgacctttgtgtacactgcagacgctggttctgaggaactgttgtttcggcctcagtgaggttgcctggatgggatctgtattagacttgagtgcaggtctctcagcactgacccaaggagttctgttatggtactgtacctgtccagtcactggttctctcctcatgtcctctcgccccatgaggttgtgttgtgtcttctaagcgtggtactagtgcttgccacctggtcaccagacctccaaatatggctgccaccaccaggacctttccagttactccttatatgtgtgttctatggaggggcagggaaaaggtggcacttgtgagtgtgtgtggattggcagggggtccattcactttgggttccatcttgctttaaatttcttcattttgattaagagacctctttttgatctgtattgggctaaccagagccaaatacttttgaagagtttcccagggactagtcatggtaatagcatataattgatctgaatgagatggagagaagaatgaaggggtggtggttctgggtttgatttgagttcacctgtgggcagtgggcagtgggcagtgtcttggtgaaagggaacggatactactttttgcctcaccgtaaagtactcactagtaaatatttccttctctctttactcccactttttacgtttgcaggtgccaaagtaatgtccacttttccctttcatgctgcatattaactggttaattatactgcagaaaccttttcacctccactagtctgatacagtacatctgtacttccatataccttgcactgattttgtctgagtgccctgggagaagtagaaaatgattgaaagtgacttccgtatctcagcccatgactcagcaaggcagaatggccacccctgccaaagtttgctctcttctcaacagtgcctcaccctccctctaggattaaagtgcttctgcccttccacgaactcctcctccatttcctttttgggatttgtcaccatccttctattctctggtcttctatttttggtgttgttcaagtgaaggaagagatgttccctctaatttctctctagcccattataccctgctatcttggggcaacttttgatgtatgacatgtcacccttcccaacttggtctcctccaacatgctgtcttcatgtggagccctcaccacaatccctgactccggtcatttgtgcctttctcttgtcatctctgtacactacttatattcactgtgggttgggggagctaattttaagcatgttcagtggcagctcccctccagtttcagtgtcactgttaaaatttatcaaaaagcaacttcactaggggttttcttaagggataaaggccttttacagaagctaaacccttccccacatgtggtagaatgtgctcttctatatctactcctcaataaagcatgttctctgccc

SEQ ID NO: 84 - DNA, 1167 bp, Homo sapiens
ccgctttttttttttttttttttttttttttttgagacggagtctttgctgttgttgcccaggttggagtgcaatggtgcaatctcagctcactgcaacctctgcctcctgggctcaagcgattctcctgcctcagcctctcaagaagctggaattacaggcatgcgccaccacacctggctaattttttgtatttagtagagatggggtttcatcatgttggtcaggctggtctcaaactcctgaccacaggtgatccactggccttggcctccaaagcgctgggacttcaggagtgagccaccgtgcccggccaggaaattgtctcctatttgaaagggttatgcaggaaaatgcctctgtttgtcaggtagcagatccacatgctcttctgctattggggtctctgtatagaccccaatagtttacacaaatggaatgcaggatctctatatttataccccaatctgtgcaacagaacttgaaaacagaagcccaataaaagtctactctttcattgggtgaacaaagactaaaagaatgaatttatgatgtactgacaacagttaggctgtaattcttatagacagacctctaaatgttcccactcttgtttaggtagcactatctaatagaatatgtgagttatacatatattttaaaatgttccagtagtcacattttttaaaaaggtaaagaggcatgggtgaaattaattttaacactaagatgtatttaactcaatatttccaatatattatcatttcaacctattaataacatgcaaaggtattcatgatatattttgcatcccttttttcatactaagacttcaaaattcactgtgtattttgcacttacagtacatccagtgtggaccagctacattttaaatttggctgctggttagcacactggtgcagttttagatgatgtgataaattgtctctttcaatgtattagattcctgaggctgccataacaaattgccacatacttggtggtttaaaagaacagacattgactctcaaagttttggagatcaaaagtccacaattaaagtgtcatcagtgtcacgctgctacgggagattcaggtccctgcctctttcagcctctggtggttccaggcattccttggcattgctctaacctctgcctccagaaa

SEQ ID NO: 85 - DNA, 1641 bp, Homo sapiens
gtcacaaaatttataccatactgttttccacagtgactgcgccattttaggttcccacctgtagtgagcaaggggccagtcgtccttgtttccggttatctttgttgtcgttgttttgttttttagagatggggtctcactatgttgcccaggctggtgtcaaactcctgagctcaagcgattccccccacattggcctcccaaagtgctgggctacaggcgtgagccgctgccctgccgttgtttttatggactctggcctaagcctgtgcttttgatgtcatatgcaacccattgccaaatccattgccatggagcttttcccctgtgtttttttccaagtgttttatggtttcaggtcttatatttaggtttgatccatatcgagttactttttgtatatggtgttaggtaagggtccagcttcattcttctggctgtggatatccagttttcccagcaccagttgttgaaaagactttcttttccccattgaatggtctgggcacccttttcaaaaatcagttgaccaagtattacaaaggtttatttctgtgctctctattttattcccttggtggatgtgtctgtctacatggcagtaccacactgattactttcagctttggaatcagggagtatgtcatctgccattgaatgagtatccactgtgtgctaggccttgtgggtggagcggtgacttggacatcgtccctgctggtccagtgccctgccgtccccctgagtcttgactttattctggatagtggaggttggcacaaaaatatctcccagttaaaggaattataattcagtcacctgactattactgacaagtcaaaaaaaaatgactcagtgggtttagtaccaaggtagcagtgttccatttgatgattcagcatatagcaggttctcttagtgaacatttctctttgtgtatttgtttttcccccacatagcaacgaagttagtttctaatgacttccattctctacttttatcagaagcagatttcacctggaatattctataaaccctttgaaaccctctattttagccatggtgtcttctaagcaaagtaattttcttgaacttaaataacaaattgatagttgaattaaccttttaaaataaaatgtaaagtgtagctaagaaatcattatttaaaggtattccaacgataaattatttgggatggggctggggaggtcaggtatattgaggtgtaagttacatatggtaaaagtcacccttttaaagtgaacaatttgatgaattttgaacaacttcagttatgcaaccaccacaacatgatggattgttttagtaaatgttcttcttaccaggagttcatccttgtttaagtctggagtttgccgtgttaaggttgcaggtgcttgaaagtgtaataaaattgtaggttttttaatcttttttttaatctcttactggaaggatgaattatagtttaaatagtaataatgcattgtcgttgttacacttactctttaagtaagttaggtcattattttccgaaatgaatgtagtagaatttcagaatggcttctggaacatgtttcctgttaaaaggcctagaatatcctgcagtggtagagtttgctccattccagaagatagccc

SEQ ID NO: 86 - DNA, 1892 bp, Homo sapiens
gctgcttccacctaagctactcacaatgccccgccttggcacttcagccacaacaaaccccccacggcacaatggtgcatatgccctgaggcttggaattgggttgcttttatgtacaaggctagctgggctttttcatcgttgccctgaagagacacctgtttgccactcctctccctggctgagtcctctggcatccatggtgggtggtcgagccaagaatttgtggtatggagcttgtgtggcggcgctggtggccctgttagctgccgtgcgcttgtggcttcgccgctatggtaatctcaagagccccgagccacccatgctctttgtgcgctggggactgcccctaatggcattgggtactgctgcctactgggcattggctgtcgggggcagatgaggctcccccccgtctccgggtcctggtctctggggcatccatggtgctgcctcgggctgtagcagggctggctgcttcagggctcgcgctgctgctctggaagcctgtgacagtgctggtgaaggctggggcaggcgctccaaggaccaggactgtcctcactcccttctcaggcccccccacttctcaagctgacttggattatgtggtccctcaaatctaccgacacatgcaggaggagttccggggccggttagagaggaccaaatctcagggtcccctgactgtggctgcttatcagttggggagtgtctactcagctgctatggtcacagccctcaccctgttggccttcccacttctgctgttgcatgcggagcgcatcagccttgtgttcctgcttctgtttctgcagagcttccttctcctacatctgcttgctgctgggatacccgtcaccacccctggtcctttttactgtgccatggcaggcagtctcggcttgggccctcatggccacacagaccttctactccacaggccaccagcctgtctttccagccatccattggcatgcagccttcgtgggattcccagagggtcatggctcctgtacttggctgctgctttgctagtgggagccaacacctttgcctcccacctcctctttgcagtaggttgcccactgctcctgctctggcctttcctgtgtgagagtcaagggctgcggaagagacagcagcccccagggaatgaagctgatgccagagtcagacccgaggaggaagaggagccactgatggagatgcggctccgggatgcgcctcagcacttctatgcagcactgctgcagctgggcctcaagtacctctttatccttggtattcagattctggcctgtgccttggcagcctccatccttcgcaggcatctcatggtctggaaagtgtttgcccctaagttcatatttgaggctgtgggcttcattgtgagcagcgtgggacttctcctgggcatagctttggtgatgagagtggatggtgctgtgagctcctggttcaggcagctatttctggcccagcagaggtagcctagtctgtgattactggcacttggctacagagagtgctggagaacagtgtagcctggcctgtacaggtactggatgatctgcaagacaggctcagccatactcttaatatcatgcagccaggggccgctgacatctaggacttcattattctataattcaggaccacagtggagtatgatccctaactcctgatttggatgcatctgagggacaaggggggcggtctccgaagtggaataaaataggccgggcgtggtgacttgcacctataatcccagcactttgggaggcagaggtgggaggattgcttggtcccaggagttcaagaccagcctgtggaacataaccagcccccctctctactatttaaaaaaatgtgttttaaagtggtggtgt

SEQ ID NO: 87 - DNA, 1668 bp, Homo sapiens
tgtttattcaattctttggtggttttgtggactagaagagggctttagatctgggctggaatctgggtctatccacttctatgataggctcattattaggtgttagtttcttatgctataaatggatgttataaacttatttcaaagagttgttagagatgaaatgaaaaaacatataaatcttcaagtggtcaatgaatatgtgttgcattattctgtttttgatatgaattatatgtctctccagatatgcataattgatctctatttgctgatataggtgatatttagcatgttagcagttccattcacttaagcttctctgtatatagaaataaatggacacaatgaaatggacttcatttgtataatgggatgtttggaaaagagtgtattatatgtatttaaagcagaataggaaaaccccattccactgaggcaggagaattgcttgaacctgggaggtggaggctgcagtgagctgagatcgcgtcatcacactcctgcctgggcaacaagaatgaaactccatctcaaaaaaacaaaaacaaacacaaactaacaaataaaaacccaaaaaagctttgtagttgtttcctatcaacttaaacatggcattttctgtgagagaatttaacattcaactagagtatcctgttgagatgacatttaataagataaggataaactaaaaggtaaaggtatgtgtgtttgcattaattttgactgtgaatttttcctcaagtatacaactgaagcgttttataattgtagataaattgcttcagtcattttgtgtgtactactgtagggtgacaatattattagaatttttgctttcctattaaaaattcacctttatttaagtgggtatgtatgatgaagtttaccatatagtttgttttttgtaatgaaacatactttaatataatactttagtatttagtataatactttagtattttcattttataggaagagattaaacactctactagggcatagttactgaagatgacatgctttgtaacagttctattttgtattaatataagagattatgttttattttttaaagagtctctaagaaatgaacaatttctagattttatgagaaacaagacacagttctctgaattctgctgtataatcccttcctttaaatccctggaagattaaatttgcaaatggaagatggcatagcacgttgagacccctcataacagaatatgcaaaattccattattcatttttatggttatcccaagaatattgatttgttaaagattaagaacatacgtttttgcacctttatatattcagattatgtataagaggaatttaggggaatatcatatagtggctaagtgcacaggctttggaaacagatttcctgaattcagattcaaatgtcacaatttgctagctgcatgattttgagcactttagcttcactgtaggggataatgggacccacattccagggttgtcatgttgtttaaatgatataaaaagtttagggccagtgtagtggctcatttctgtaatcccagctacttgggaagctgaggcaggaagatcatttgagcccaggagtttaaggctgctgtgagctatgattgagctactttgctccagctctgggcaatagagtgaaaccccatctct

SEQ ID NO: 88 - DNA, 1849 bp, Homo sapiens
  misc_feature 1810,1813,1814: n=a,c,g, or t
caactcagttctgcctcctgactatgacagtaatcccacccagctcaactatggtgtggcagttactgatgtggaccatgatggggactttgagatcgtcgtggcggggtacaatggacccaacctggttctgaagtatgaccgggcccagaagcggctggtgaacatcgcggtcgatgagcgcagctcaccctactacgcgctgcgggaccggcaggggaacgccatcggggtcacagcctgcgacatcgacggggacggccgggaggagatctacttcctcaacaccaataatgccttctcgggggtggccacgtacaccgacaagttgttcaagttccgcaataaccggtgggaagacatcctgagcgatgaggtcaacgtggcccgtggtgtggccagcctctttgccggacgctctgtggcctgtgtggacagaaagggctctggacgctactctatctacattgccaattacgcctacggtaatgtgggccctgatgccctcattgaaatggaccctgaggccagtgacctctcccggggcattctggcgctcagagatgtggctgctgaggctggggtcagcaaatatacagggggccgaggcgtcagcgtgggccccatcctcagcagcagtgcctcggatatcttctgcgacaatgagaatgggcctaaattccttttccacaaccggggcgatggcacctttgtggacgctgcggccagtgctggtgtggacgacccccaccagcatgggcgaggtgtcgccctggctgacttcaaccgtgatggcaaagtggacatcgtctatggcaactggaatggcccccaccgcctctatctgcaaatgagcacccatgggaaggtccgcttccgggacatcgcctcacccaagttctccatgccctcccctgtccgcacggtcatcaccgccgactttgacaatgaccaggagctggagatcttcttcaacaacattgcctaccgcagctcctcagccaaccgcctcttccgcgtcatccgtagagagcacggagaccccctcatcgaggagctcaatcccggcgacgccttggagcctgagggccggggcacagggggtgtggtgaccgacttcgacggagacgggatgctggacctcatcttgtcccatggagagtccatggctcagccgctgtccgtcttccggggcaatcagggcttcaacaacaactggctgcgagtggtgccacgcacccggtttggggcctttgccaggggagctaaggtcgtgctctacaccaagaagagtggggcccacctgaggatcatcgacgggggctcaggctacctgtgtgagatggagcccgtggcacactttggcctggggaaggatgaagccagcagtgtggaggtgacgtggccagatggcaagatggtgagccggaacgtggccagcggggagatgaactcagtgctggagatcctctacccccgggatgaggacacacttcaggacccagccccactggagtgtggccaaggattctcccagcaggaaaatggccattgcatggacaccaatgaatgcatccagttcccattcgtgtgccctcgagacaagcccgtatgtgtcaacacctatggaagctacaggtgccggaccaacaagaagtgcagtcgggctacgagcccaacgaggatggcacagcctgcgtggctcaagtggcctttttaggtgggtattcttcagccgcctctagaatctctgatcctctctctcgggcctcatatctttctctaggccttggactttgccttcagttanatnnactttaaatcccatcaataaaggaaaaaacaaaac

SEQ ID NO: 89 - DNA, 1508 bp, Homo sapiens
  misc_feature 1472: n=a,c,g, or t
acaggctcctggcaaacccccacctcccagcctcgcccatgttgccctggactgtcgtcatggcacttgccctgagaccatctgggccgaccctcttctgccttttatctcacgagcactcccgtgccctccccccaactcactgtgcgttctgaaactcatcgtctgttgtcagcaaaattcctgtgattccatcttctcggaataggaagttccctctgccttctggccttactgaagcccactcagtaccctgcagccctcttaagtggaatctttttcctcccactccccatgtgcggtgagcctagagcaggggtgtgtccttgcctcttcctcaacctcctcacttggaacagtctgtcttcacctctacccctcacagccaggcaggcatatctcttgttactggtgaaggcactgcctccaaagtctggattgaggcatccctccctcaagccaggccctccctcatgtggcgcttccctgtgctcttcaaaccaccaggccctccaagctcctggcccagccccttttcgccaaccatcagcccctctttccttgctttcctcccagcccagtttagaactcttggtcatctgcatgcacttcccatagtgccctccatccttcgtttatgctcacctggcaaggtctccaccctggtgacagccagctgttccttcgcctgccctgcacctgcctgagcccccagagccacaacggctcgcgttccatccatggcccaggtctgtgtttccctagacaactccctcatgcattctctgaggaaacttaacagcctttgtctcttcaggcctccagcaccctccctgccagcttagctaaggcactcccttctgttcccacaaccaccccacattagctgccttccttaccctacctgaggacatgcctcgggtgtgtgggagatacagtgctctcaagggtctttcttctccccttctccctccatcgtgagttttcctacacgggctccttcacgccagcctccacatgtgccccacgtgtcatgggacgacacagagcaaaagcccagcaccctcagctgctcctgtcctctgccccattttatcacagctatcacagctccccggaaagctgtcttctctgtccatggcctcacctcacccagggcactggccttggtccacatcaaggggacctgaagcttccctgaagcctctagcctgtggtgtgcacgtacaagcctcaggccccatttgtccagcctgtcagcaggtgggaaatactaagtcaccctcttctggttatgtttaattttccaatttttctcaacattactgaaatgtctaaatgtggaaaagttgacatcattttacagtgaacaccacatacccaccacctagattttaccattaccaatttcctgttccgtacttgtatattcacatatatccaactattcatccctgcttcaatccatcctntttttattgcatttcaaaataaaatgtgaaatcagg

SEQ ID NO: 90 - DNA, 1532 bp, Homo sapiens
gtttttaatgccttttatttaaacaaaacaacgaaatccatagacttctggaataccagcaaattgtatgtgttttcagttagtcatcatgttatattaacagttcattaaacaaatgacaatttgtaaattcagtccacagaatagcatactgaaaggctacacatgtagaattattagataaaaaggaacatcactgcccttcataaattctagaaagttcattgcattcattattcacctttaaattcaaaactggaatttgatgatgattgcaactgcagctgagggccataaactaaaacaatttactgggtgtggaaaagggggctgggaagagccgtgggctaaccatcctgttaacaaggagtgtctcctcatgaaggtggcagccaccagaacgaggtgctgcctcctaccctacaaatagcaagggcccatgcaaatgaaaagtgagcctttgagatgagtctagataataatgcattggagatttcctgttaaactagcactcttaagaacatagtggcattttatttcaatcatagtataaaactcactggtttattcaattttattatattttagatgttggtattaatataccaagcaagattctttttaagttttctatttcccctttctaaaagctctatatcgggttcttcaattacattctcaaattatacaaatactacatgttttctgacaaataccgtattttggtaatgttaggctggaagtaaactagagtctttctgtaactttgacttatcctgcaatgtttggatgatgggacacatcaccctgggaactgtctcaaagcacaaccacatcttagggccctacgctcactccccaaaggcagatccgcctccaaaactccaaatcctcatggtctcaggcatcccttttaaacacgggcacaatcgtcacctctttgaaatgagagcgtgcttgattattcctggcctccagttgctggccttcatccggtgttggggtgggggagcctgtcggttcctgaaaaatagctcggggataactaagacaaaagaccctgaggagctctgcctcaactgtggcaagctgggtcttccacgtcaccaagtgtcattttcaccgtgcctgtatggtccgctgttcatcctgttagcggaccccgaaatcaggcaggaaaataaagctcagtgggagggcctcggagcaagacaatcccaccaagatggactcgggttgattaacgtgagtgaacctctgaggaccagaatccagactagtaattctccatcccggctgctcgttagatgcccggaccgacccccccagaccaattcaatcagaacattcggaggggcttgtaaaatctcccggggagattccggtacgaaagccaaagactcagacgcccgttctccacccgcctgcagcggccagcgcgggtccctcttagggaattgaatgcaggccccaggcctcctcctcgagtatcccagtgtgaccgatggccagctcacaaacgcgcagtgggt

SEQ ID NO: 91 - DNA, 1951 bp, Homo sapiens
atcgacataaagctggaaatggagaagaggctgcaggatctggagaatcagtaccggaaagaaaaggaagaagccgatcttctgctggagcagcagcgactgtatgcagactcggacagcggggatgactctgacaagcgctcttgtgaagagagctggaggctcatctcctccttgcgggagcagctgccgcccaccacggtccagaccattgtcaaacgctgtggtctgcccagcagtggcaagcgcagggcccctcgcagggtttatcagatcccccagcgacgcaggctgcagggcaaagacccccgctgggccaccatggctgacctgaagatgcaggcggtgaaggagatctgctacgaggtggccctggctgacttccgccacgggcgggctgagattgaggccctggccgccctcaagatgcgggagctgtgtcgcacctatggcaagccagacggccccggagacgcctggagggctgtggcccgggatgtctgggacactgtaggcgaggaggaaggaggtggagctggcagtggtggtggcagtgaggagggagcccgaggggcggaggtggaggacctccgggcccacatcgacaagctgacggggattctgcaggaggtgaagctgcagaacagcagcaaggaccgggagctgcaggccctgcgggaccgcatgctccgcatggagagggtcatccccctggcccaggatcatgaggatgagaatgaagaaggtggtgaggtcccctgggccccgcctgaaggatcagaggcagcagaggaggcagcccccagtgaccgcatgccgtcagcccggcccccctcgccaccactgtcaagctgggagcgggtgtcacggctcatggaggaggaccctgccttccgtcgtggtcgtcttcgctggctcaagcaggagcagctacggctgcagggactgcagggctctgggggccggggcggggggctgcgcaggcccccagcccgctttgtgccccctcacgactgcaagctacgcttccccttcaagagcaacccccagcaccgggagtcttggccagggatggggagcggggaggctccaactccgctccaaccccctgaggaggtcactccccatccagccacccctgcccgccggcctccgagtccccgaaggtcccaccatccccgcaggaactccctggatggagggggccgatcccggggagcgggttctgcacagcctgaaccccagcacttccagcccaaaaagcacaactcttatccccagccaccccaaccctacccagcccagcggcccccagggccccgctaccccccatacactactcccccacgaatgagacggcagcgttctgcccctgacctcaaggagagtggggcagctgtgtgagtcccacatcctgggcagagggcctggtggggccccttgctaggagaagggaagacgcccgagacgctgcttccccagaagtgctggggcagggaggcccaggagatgagagagaaggtccgagtaggtgatagaagacaagggggagaccgagccggaggctgaggaaaggaagagggcacggagttgccaggagcaaaccaaagtgaagagagagataggaagctgcctcggggccaccccttgcaaagggggtgtgtcccacaaacgctgctatgggtggggtggggggctggggtgctgcgtagccagtgtttgactttcttttcaagtgggggaaagtgggagaggactgagagtgaggcaagttctccccagcccctgtccgtctgtctgtctgtctgtggtggtttctgtttcttgggaggcatggtaggatcataagtcattcccctccccttccaggcctcctgctatatttgggggacctgactggtttggctggagtcccatgaggatgtgggccctttaataaaggatagcaaac

SEQ ID NO: 92 - DNA, 1505 bp, Homo sapiens
cagaattcccatatggccctgggcttttctttcttgggaggcttttctttactacttcatgctcttgactagcataggtctgttcagattttccatttcttcatgattcaatcttgataggctgtgtgtttctaagaatttgtccagttcatctaggttatccaattctttgatatgtaattactcatagtactcttaatcctttttatttctgtaaaatcggttgtaatgtctcctcctggtttttagttgtttttcttagtcactcttagctatcaacaaactcttggtttcatttatttttctctattgcttttctgttctctattttgtctctgctctaatctttattattattataatctccattctgctggctttgggttgattgctcttctttttctagttctttcagatgtaaattttgggttgacttgagatcttaatttgtttaataggtgtatttacagttacaaatttccctcctaccactgctttgactgtacctgtttttttgtatattacgtttaagttttcatttaccacaagatattttctaatttcccttgtgagttccccattaatctgctggttgagagtgttgtttaattttcacataattgtgtacttttcagttttttgtctgttactgatttctagtttcatcccactgtggccagaaaagatattttatttcctcagtcttttgaaatttgttgacttgtttagtcatctaacatactgtctatcctagagaaaggtccatttgcacttgagaaaaacgtgtgtactgctgttgtgtctgttaggtccagctggtatgatgctgttcaagttctgtcttgcgactgatcttctgtctggttgtcctatccgttactgaaagtgggctactgcagtctcctactcttactgtagaactatccatttcttcctttgattctgtcaatgtttgtttcatatattttgggctctgatgtttggtgcatatatattacatcttggtgaattttcaaactttttaaatttcaacatgaagatgaaattataggatgtctgggatttcctttgaatccgtggggctgggagtaactataaatgaaacaagattggccgggaatttgaggctgcaaggataggtacacacaggggagtgaagcagggcttggagcagatggtaaagattgttggcttttccagccatggggctctcttgccacttggcagtagtggcatgaagccgccaccagggggccacgcaccagtgcatgtggctgtgttccaaactttttggacaataaaatctgaatttcacatacttttcttatgtcattagatattacccttttacatcttttcactatttaaaaatgtaaaaatcattcttaacatttgggctgtgcaaaaacagctggtgggcccaattttggcctgtatttcacttgccaacccgatttatacttttgtatctatttgacattttccattaaaagttatataacact

SEQ ID NO: 93 - DNA, 2280 bp, Homo sapiens
gactcgaatcccgttgccgactcgcgctctcggcttctgctccggggcttcttccctgcccgcccggggccctgaccgtggcttcttccccggcctgatctgcgcagcccggcgggcgcccagaaggagcaggcggcgcgggggcgcgctgggcgggggaggcgtggccggagctgcggcggcaagcgggctgggactgctcggccgcctcctgcccggcgagcagctcagaccatgtcgcctgaagaatggacgtatctagtggttcttcttatctccatccccatcggcttcctctttaagaaagccggtcctgggctgaagagatggggagcagccgctgtgggcctggggctcaccctgttcacctgtggcccccacactttgcattctctggtcaccatcctcgggacctgggccctcattcaggcccagccctgctcctgccacgccctggctctggcctggactttctcctatctcctgttcttccgagccctcagcctcctgggcctgcccactcccacgcccttcaccaatgccgtccagctgctgctgacgctgaagctggtgagcctggccagtgaagtccaggacctgcatctggcccagaggaaggaaatggcctcaggcttcagcaaggggcccaccctggggctgctgcccgacgtgccctccctgatggagacactcagctacagctactgctacgtgggaatcatgacaggcccgttcttccgctaccgcacctacctggactggctggagcagcccttccccggggcagtgcccagcctgcggcccctgctgcgccgcgcctggccggccccgctcttcggcctgctgttcctgctctcctctcacctcttcccgctggaggccgtgcgcgaggacgccttctacgcccgcccgctgcccgcccgcctcttctacatgatccccgtcttcttcgccttccgcatgcgcttctacgtggcctggattgccgccgagtgcggctgcattgccgccggctttggggcctaccccgtggccgccaaagcccgggccggaggcggccccaccctccaatgcccaccccccagcagtccggagaaggcggcttccttggagtatgactatgagaccatccgcaacatcgactgctacagcacagatttctgcgtgcgggtgcgcgatggcatgcggtactggaacatgacggtgcagtggtggctggcgcagtatatctacaagagcgcacctgcccgttcctatgtcctgcggagcgcctggaccatgctgctgagcgcctactggcacggcctccacccgggctactacctgagcttcctgaccatcccgctgtgcctggctgccgagggccggctggagtcagccctgcgggggcggctgagcccagggggccagaaggcctgggactgggtgcactggttcctgaagatgcgcgcctatgactacatgtgcatgggcttcgtgctgctctccttggccgacacccttcggtactgggcctccatctacttctgtatccacttcctggccctggcagccctggggctggggctggctttaggtgggggcagccccagccggcggaaggcagcatcccagcccaccagccttgccccggagaagctccgggaggagtaagctgtcacgacgctccctctgccagctggtcccgggaattctgtgaaccaggctgctgtctcctccccagaaagagtccttaccttggagagggtcctggagagaatttcctcttccccagctaaataccctgcctgcaactgaagcagacccgggggtgtcctccctgccctctgcccagaggccacctccactcctacaaaaagtattgtccagacaagagtcactggcccctgctccagcttctgggtatccagagagcactgcacttccccaaaacggaaggggcccctgggcagtgggttttgggcaaattccctttctttgcatccacaatgtggggtcggagcttgggggcaggtcctgggagtgggaagcctcttccttgtgtctttcgctccacttttagctcatcgcaccaatattgcagacttggaaggaagcataagcttcccatttcacaaaggggaaactgaggtgcgggtgcgcgggcctggggacggccgtcccatggcttccatctgagccacctcgggaccccagcgctcctggcgccctcttctcatcgcttggcctatgacaggtcaccgtgtgtaaatctttcccaataaagtgttgcacaaaggc

SEQ ID NO: 94 - DNA, 2828 bp, Homo sapiens
cactgatctttagattgatacaattgctgttttattcattggttcatatacacctaatgagattgctattttaattttcattgttaagacacacttaaattcctaatacttaaaaacgtatatgaaaaatttattttcacaaatcgatatacctattttttgaacagtagtatgcatattgctttacaaaatgacagtgtaaaaatggcattcagattcccgtttctaagatgcttgaacattttgatttttactcattagaagtttaattgttattagtcaacaaggagaaacaatgaggaacttacagaggagtgtcagttgtattgaaagattaggagtgaatgttttatcttgtaaaaagatatctcagcccctaggatggtctacagaaatgacaataagctccgattcttattttaattttttattttttctgtttctctgtctcctgtcttttcctgcgcattctctcttttactcccaacctctcttgtttatttctttggatccgtcaaagttggaaattgaacagtatttctgatatattatgtagtatgagttctgaaatcttggtgaattaaattcatgaatgctaccatagtgattttattaaggtgtggcttttgattacatgttcttcaagctagggttatgggagtcagctagtaggtaggcttagtttgattgtcctactttaacatttgtttttccttcttgaaataactttcatgaagttagatacaggcttttgtacaggatcattttgtgggaaatggtgggtctgaaaagtaagccattggtattgataaaagcagagagaaaatgaaaaagaaaaaaggtaggaaagatgtgccttttagccaataaatagaagtttaaaagacatgaaagaatgagatgtaatttttttaggagctctaatttagccatgaacacagccaccattactctgcagaaagggaaaaaaaggggattctgtttcagaatttgctgtattaaaaactatttgagaaagagaacactttattgaaaattgaaaattattggctaacattcagtgtgagggtatgtcgaagtaccatccgactaaaaacaaattaagtgtagtcgtgagtcaaacatattgtttcttccaaaatttaaattaaattagtttcatatgagtgttttctttttttcttgagacagggtcttgatctgctgcccaggctggagtgcagtggcatgatcacagctcactgtagctttggcctcccaggctcaagtgatccttccacttcagcctcctgagtagctgttactacaggcatatgccactacacttggctaatttttaatttttttgtacaattgggggtcccactgtgtttcccaggctggtctggaactcctgggctcaagcgcctccagcctccagctcccaaagtgctgggtttacaggcatgagccactgcacccagccaattttatgtgttgataacaatcttgctgaacttactgtttcttataacttataggttgttcttcttgggattaccaagtaaatgtcctttgcagtagtgacactttttctttcttttcaatctaagattttgcttttttctctgattgtgtaaagttagcacttctaaaacaatactctcagcatgtattgcatgattacatactttttcttcttatattaataatatgaagtatattaattgaatgctcaatattgaattaatcttgaacttctggaatatgtcatataattctattcttttaaatgagttattatgaaaaattttaaccatacagaaaagttgaaatttattcggtggaaatctgtatatcctctgtcttaatttaacaattaacattttgctatatctcctctttttttttgttagaccacttgaagctgtttttgagaatacagattccaatacaaccacaaaaaccttaccacatctaagaaaattaatactgattctatcttatgtaatatctgttctttatttaagtttcccgaaatatccccaaaatatcttttatagctttcatttttttccaaaccaggcaaggtttatacattcattgcatgcggttatgtctctttcatctctttcaatctagaatagcccaccccatcatcttttcttctgttggacagttatactaatatgcagagatgatgtcatatttttcactacagaaaaagcactcataaatatgtataaatgtatatcgatcataatgcttgagaaggaatgggcattggacccatacctctgcactctggcttgaaggaagatgaaaagtttctagatacaacagaggaaatgataatatagagaagtccaggaggtacaaagtctgtgtgacaaagatagaaagtagaggaatgtgatacaaagggagaaataaaacctttgaatcttggagctatataataaatgttaagattcttcatactgaggttgtgaagcaggacaatagtgaagaggaatactgaagaaattataggagttttaaaaatgattacaagatatatcctatatagagagaatattacaatttctggtgaaaactatcaaatataaggggatattctccagaacgaaaaggtgaaagaaaacacctcattggcactatgtaaaagaaatgggttgtaattatccaccactgcacctgccagccacgaatggctgtttaaacttcagttaaactagttaaaattacataaaataaaaaatctagtccctcagtcacactgaccacatttcaagtgctcaatagctatacatagctagtggctccatattagagtgttttcatcatcg

SEQ ID NO: 95 - DNA, 1527 bp, Homo sapiens
cgacctccgcgcgttgggaggtgtagcgcggctctgaacgcgctgagggccgttgagtgtcgcaggcggcgagggcgcgagtgaggagcagacccaggcatcgcgcgccgagaaggccgggcgtccccacactgaaggtccggaaaggcgacttccgggggctttggcacctggcggacgctcccggagcgtcggcacctgaacgcgaggcgctccattgcgcgtgcgcgttgaggggcttcccgcacctgatcgcgagaccccaacggctggtggcgtcgcctgcgcgtctcggctgagctggccatggcgcagctgtgcgggctgaggcggagccgggcgtttctcgccctgctgggatcgctgctcctctctggggtcctggcggccgaccgagaacgcagcatccacgactttctgcctggtgtcgaaggtggtgggcagatgccgggcctccatgcctaggtggtggtacaatgtcactgacggatcctgccagctgtttgtgtatgggggctgtgacggaaacagcaataattacctgaccaaggaggagtgcctcaagaaatgtgccactgtcacagagaatgccacgggtgacctggccaccagcaggaatgcagcggattcctctgtcccaagtgctcccagaaggcaggattctgaagaccactccagcgatatgttcaactatgaagaatactgcaccgccaacgcagtcactgggccttgccgtgcatccttcccacgctggtactttgacgtggagaggaactcctgcaataacttcatctatggaggctgccggggcaataagaacagctaccgctctgaggaggcctgcatgctccgctgcttccgccagcaggagaatcctcccctgccccttggctcaaaggtggtggttctggcggggctgttcgtgatggtgttgatcctcttcctgggagcctccatggtctacctgatccgggtggcacggaggaaccaggagcgtgccctgcgcaccgtctggagctccggagatgacaaggagcagctggtgaagaacacatatgtcctgtgaccgccctgtcgccaagaggactggggaagggaggggagactatgtgtgagctttttttaaatagagggattgactcggatttgagtgatcattagggctgaggtctgtttctctgggaggtaggacggctgcttcctggtctggcagggatgggtttgctttggaaatcctctaggaggctcctcctcgcatggcctgcagtctggcagcagccccgagttgtttcctcgctgatcgatttctttcctccaggtagagttttctttgcttatgttgaattccattgcctcttttctcatcacagaagtgatgttggaatcgtttcttttgtttgtctgatttatggtttttttaagtataaacaaaagttttttattagcattctgaaagaaggaaagtaaaatgtacaagtttaataaaaaggggccttcccctttagaataaatttcagcatgtgcttt

SEQ ID NO: 96 - DNA, 1954 bp, Homo sapiens
gggtgcacaagagagggacgccacctgtcagccaagaggcctacagacttctgcgcgcgttgccttgacttgtctctgatcttttcctgatcggacttcctctgcagcagtgaaacctaatttggaaagttcttagtcacaggaggcagtctcgctacagtagtgggcttttccttttctattcacttcttcctttcatccacttttatgagcggccattatgttcctttcttgtttgatccttaattcattggtccagtgttttaactttaaattcttcctgtcaaccactaagctaaatacagaggttaaaaaatgtttgctttttaagtgctactttatttttcttcagttgtgtggggaggaaaacattcctgagcattcatgatgcctgaggcacttgacatatgcccttatgtctaattttctctgcaacccagggaaggacaaatcactctcttcagagagtcctctcaaaatgcgtattttctattataatagtatatgtacataatttatagtacatgtatttgggatgtatgccaagtcttgtcttaatagtatggtatgatcagagcagtgtagagaggccgggcatggtgggtcacgcctgttatcccatcaccatgtgaggctgaggtgggaggatcgcttgagcccattagttcaaaaccagcctgggcaacatagggagattttgtttctacaaaaaaacttaaaaatgagccaggggtgctggtggtgcatgcctgtggtcccagctactcaggaggctgaggtggaaagatcgtttgagcccgtgaggtcgaggctgcagtgagctgtcattgcaccactgtactccagcctgggcaacagagcgagaccctgtctcgaaacaaaaaaaaaccatgtagagccccattctaggatagagtgggacttagggcattctggggctttcctgtccatagggctgttaatgagagtcagtgagttgaagtgcaaaaagaacttagaatgaagcctggcatatagtaaacagtattccaatattcatcttagccactgttgtgatttcttaaggatcattacttaattcctcaccagtgaatttgaaatgctcaaaacagacatgtaataaaccatgatttttccttttccatgaaggtatgagttggggaaagtatgaaatagggcaagagaaaagatgcattgaggagtcacattcataagactgtattcttcttataagtgggcagaaagctttactcctaagtttcctgatagctagtggaaagagagaaaacacatgtggaaggtggtgtttataaagacaaaaatgtccattgcccaaaatggtaccgggtctggagacgcatacctccttgtggaccccctagaggggagaagccaaggttgcagcaagccccttgctcttttcacccttgtcttctctgtagctcaaagagaaggttctgatgaattgtttgtggcatatgtttggtatctctggtccttagttcctgaacaattctgggctaatgctgtagtcaggttacagttagctttcttcttgatgttcatttaagcctataacttgatttggatcccaccaaactacctatagggccctggaccgacactgattttatttttcttttgctgattctattttaagtgtccattcaacatagagccttcagaaggcaaggggtaaagttggatcctagcactttgggaggccagggtgggtggattgcttgagctcaggagttcgagaccagtgtgggcaacatggcggcaccctgtctctacaaaaatataaaaaattagcagggtgtggtacctgtagtcccagctacttagggggctgaggtgggaggatcgcttgggccttggaagttcgaggctgcagtgagccgagatagcaccactgcactccagcctgggcaagggagtgagaccctgtctc

SEQ ID NO: 97 - DNA, 2378 bp, Homo sapiens
  misc_feature 1499,2330: n=a,c,g, or t
tgagataagatgcaaagggctctgtgtggatgaggaacgcaccttagaggagtgggaaaggccaccagggttgggccctgtttaggtaattcctgttggcagcacctagagagagcatctgagctgaaggagtgggaaactttgcccaagcaatggcacgggcagcgggctctttctggcgccctgtgctggagcagggccaagtcttagggcatcacaaacagcccatttgatggagggagcagggacatagcacatttttgtctgtctttgtgaggctgctttgctaactctctgaggagaggaagcctctcgggctttccgtcggctggggctagtgccagagaatcccttctcagtggccagcaggttcctgggaggccggcacaaggcaccgctccccactcatgacaccttggtgcagagtgacctcctgcccagtcaccactccggccagccccagccaaacacacaaaagcccatggttgcggttgcatctacaccgttagttggcaaaggatcctgcttgagctctgcgtggtggccaaggagtagcatggaggagggccctgattttaaaaaggaaaaatagagaggcctcaaaacaatgaaacaaagagcttgatatgtcaagaggagaccaaggccctgggaggcataggcaagccgggcagagtcagaccagtgccctcccttgaccatctcctagcattccttaacctagacaggggctaccccatgtgagtccaagccagactttgtggctgtccccagcctgcacagcccaagcccagggaagtgtcctttctttcccttccttactaataatgggccttcctgagacacattcagagaaggatcagagagaaaggagaaccatccaggagagccacaagcgtccaccaaacagtgtctcaggcctcacctgaagctgctgttcctcctatcagcacactagtattaaatgggtgttccataatgaggagaatggaaataggtacaaggcatctagcttaggacagaatcggatttcggcatgtgaaggaatcccagagctgatctcattgaaatgatctatcgtacagacaaggatatgcaaatccacagaagtgaagggatttttgctcaagatcacatagctggtaaactaaggtaaggttagggcttgaacttgggccttctgactccttgtccagtcagtgttctttcatctcaccacagctgcctcctttgaaacagaggtattaagatctgtccttctggttcaccctctcatacctctttactgcctctcccacatcccccacatgcctcccaaaatgaaagacaaacaggattgtttctgagaccaagatcagtctgtctgtgatcagcctgtgtgtggttcacccagtcatgcaattaagggcagatctgggccagtggaataggatagctgattggtgtttgttactgtgaaccctagaccgtaccccgtagaatggtgtctcttgctttgnaacacatcgggccttcagtgtgctgtattcctcagaagtgagggcatctcggtccattctgcccatggccacagggtgcagagaggcagcagggcccatgcaagctgccaccctgggatttgctgggctggagttcaacagatgtaaagacttcagtgaagcaataaacacaaaactctgggagaagatatccagaattttgtacattactctgtttctttttcaaaaatgaggcagatcagatgcccctgagctgcccctttttttctgattcccaactgcaatgtcctcagtcagtgttgtccctctgcccggctccccagctctttgccaacctcttcacactccccttgagctgagcatcagtcgcctgtgacgtggccaccttctgtcctgctcccactcccgacccatgctggaccccggaggacctcctgccccgcccccaccacacacccatatcccccaccattccaatttgttctttcccgtggggaattttttttcccagcgtctccatcccttcctacatatccacacacacacaaattggtctgatcttttttccattggttaaacatttaactccatgccagaccttgttttaacccctctcacatcatgttctttccttttttgcgagttattttgcattaaccaactttgtcagtgacagatgcgtatctgagggtgtcacacacgaccttcagcagggaagacttctgggccatggagggccgtctaatacatggacttataaactgactgcatgagcaatgaaaaggccaaattattctgaattttttttgaatcactgtaaaaaaactgatntcttttgtatagagaacactaaacgtataataaaagttgttcaaaatg

SEQ ID NO: 98 - DNA, 3335 bp, Homo sapiens
  misc_feature 3212: n=a,c,g, or t
gtgatttatggaccaggaaacctgtcaaccaacaacaatactctcagagaccacttcaaagggatttcttcccatagcagaagctcactcatgcccctgagaaatgatgtggataagagaggggagacgacctcagcatccttgctaaatgctggattaagccacactgaataccagatagtcacagaccctggggacgtcccagcttttttgaaatggctgtccttagccagcttgcttgtttatgttgctgctttttcaattggtctaggaccaatgccctggctggtgctcagcgagatctttcctggtgggatcagaggacgagccatggctttaacttctagcatgaactggggcatcaatctcctcatctcgctgacatttttgactgtaactgatcttattggcctgccatgggtgtgctttatatatacaatcatgagtctagcatccctgctttttgttgttatgtttatacctgagacaaagggatgctctttggaacaaatatcaatggagctagcaaaagtgaactatgtgaaaaacaacatttgttttatgagtcatcaccaagaagaattagtgccaaaacagcctcaaaaaagaaaaccccaggagcagctcttggagtgtaacaagctgtgtggtaggggccaatccaggcagctttctccagagaccctaatggcctcaacaccttctgaacgtggatagtgccagaacacttaggagggtgtctttggaccaatgcatagttgcgactcctgtgctctcttttcagtgtcatggaactggttttgaagagacactctgaaatgataaagacagcctttaatccccctcctccccagaaggaacctcaaaaggtagatgaggtacaaggtcctaagtgatctctttttctgagcaggatatcaggttaaaaaaaaaaagttactggctggtttaatactttctaccttcttcacagagcagcctttgaatagactatgtcctagtgaagacatcaacctccgccttaagctatgtatgtatggaggccagtcgcagctttattatgcagacacacaagtggtctggacatgagggtacagtttctgcctaccaagacactacttgcactggatcttacgcaaaaaagaaccagaacacacagtgtggacaactgcccatatattctatctagattaggagagggtcctggctaggattttagtggtaattcctagttacattcaacaagtataaagattatagagcttattttatgaactataaactataatttaatgcaaaatatccttttatgaatttcatgttaatattgtgaaatattaaaataattccacaagaaaaaaaaaaaaaaaaaaaaagcggccgctttttttttttttttttttttttttttggggcctcccaaagttttatttttttattgggccctgccttgttccagaaaacgttgaaggtggcttcccaaagtctaactagggataccccctttagcctaggaccctcctccccacacctcaatccaccaaaccatccataatgcacccagataggcccacccccaaaagcctggacaccttgagcacacagttatgaccaggacagactcatctctataggcaaatagctgctggcaaactggcattacctggtttgtggggatgggggggcaagtgtgtggcctctcggcctggttagcaagaagcattcagggtaggcctaggttagtcgtgttagttcttccctgtgctgagcagagacttccagaagcaccagaaacggagccagatgaaaggaccccaacacctccccccgccaacctttgacagaatataggggcatcttcagcctggacacgcatgcatctcccctctcagaccctcagcacttcttccactcccatcaagagccccctcacggtccctctcacactctgccagtccccctagacacccctcctcttctctgccctctctcctgtgccctctctcctcagcccctgttggttccaggctgagatgcgtccccacctgattaggcccaaatctgggctcctcgtcagcactggggcctggcctctgccccctccaggacagggtcagggatggggcctcactgttgtttggcctgggtacccccctccagtgggccaccctgcagcagagggcatgtactgggggcccgaagcagggtggctgtgaaagcagcaataatgagtaggttcccagctgcagccaagaccagtgtggccactgtgcctgccaggcccagggcaggttcctgtgtggccagccaggctctgcgtgatcccatatcagccagcactgcctccagctggaagtgggtgcccagcactgcacagatgtggaataactggtggctgtggccgatgtaatcaaagcgtcctggtgccagcctttcaggcaggtgggaggcgaagaggaagccagtgagcagcgcgcagaagagatggtagccatggctggtgctcagggcctcctgcccacagccgtggcccctgccccagcacagcccgagccgataaaagagtgggaggttgtcgaacaggaatggataggcgaaggctcctgtgcggaggaccttactgagcccagggctttccagctccaggaaacgggagtagcaggagaggccggtgcacaggaaggagttgagtgcggcggcaggcacaaagaactggtgcaggtggccgtgcagccaggaggccggcatggagtaggcggcataggggaaggcgcagcccagactgtagaggctgagcgcgccgtagtcgaggaagtagcagatgtggcgcatgcggggcgacatggagctgaaggtgtgcgcgcagcacgacgcgaaggggtagaggcaggcgggcagcaggaagaccagcagcggccagtggtacggctccgcacggaagccggggccgcccgccagcgccaggagccgccacaggaagtacctgcggcgggcgcgtgctcaggccgccgcggacccccgcgactgccgctgcagcccgtgggcctggacggtccctgcccgcctgggtaccccctctgagctcaaggccgcggcctggggcggagcctcccctcaccaggtgggcaggaagtgagtccagatgttgaccgtctcgttggtcatctggaaggagctgaggacacagtccaaagccgagctggtggggcggnggtagccagacatgatgccatcttcccagaacacccagagcttggtgggtgctcctaagctggtgggtcaacaggcccagggctccacgggcggagtccaaggctgctgccagcccttagaaa

SEQ ID NO: 99 - DNA, 1583 bp, Homo sapiens
ttttttttaagtgctccttttaataattttattagtatggccacaagtttgatgtctacagtacatgttaacatagctgagtacaaatatttgaaataagtgtggcaagttttaaaatgtcaactctgagttatcatgcatgtcccatgcatttacatctgcatctgcaaactgtacaattcaatctgtgcttatcctcactgggtctccctgtgtgcctcagctagggcagggcaggggctcttgtgcgttttttcagacccagattttcaagagcaacagtgttgaactctggcatgccatggtgcatggtggcaacaccgggtttagctttggttcaggtaaaaatgcaagtgaccaactaattgcatttgtgtgagtcacctgattccccagggcctgggctagcacaaagggtattttgatatccctgtatgaggcccctggcagtttctgaacccgtttcgtcccacccgtgaaagtctagaagtgaggttcgcagtcttctaccatgctgtcagtgatatagctggaaccaagatgggattcgtagtaactcttttcatcaaaggtattaacagtccaaccaacaacctggattcctttagctgaccacttcttcaagtaggccggggatacaaaatccttttgcatgaggaaagctgaaattccacacaggtaccacaagatattatgcatgctccaatcgagcaaaatgtccatcataacaaatataaaatgtttccagaaagtatcatagcgtggtttcccatctcctgtatggcttaggctccaaggtctgtgagttaatgctgttattacatcccgatctgtttgtctcatcttgtagataacttctggcaagaaagaacagaccacactattattatacagttgaggaaattccatatacattttctttagagcctcagtagccttgtgtgcatggcctttgacatcaaagaagattgtgaggttatggtttaggcactctgcaacagcttcccttagggtagggatcttttcatcagggaaatcattcctgagtctgtggtttgctgcaggattcagcttcctaatttgttcaaatgtcaaatcacacaatcgcccagtcccatcagtcgtcctatctactgtgttatcgtgcattaagacaggaatcccgtcagaagtaaactcaatgtccaactccacgcctgttgctccattcttagctgcctgccgaatggccgccagcgtgttctcgggcgcgtcgtggctgccgccacggtgggcgatggcagaaatgcggtcccggggcttgagcacctgcagggccctgcaagagggcaccggctcaaagctgaagacgcgcagtagaacgaagaggctgccggtgaggaggcaggcattgaccgggtccgcgtcaccagcagcagcactagcagcaggaaggagaaagggcccaggaggccgccctggtcctcccacagccacatgccggcgcccgcaccggcacggacgggagtcccggacccgccgggctcctggggcagtagaacgagaagcgagggggagggtccaaggcaccggcagcagcgaaa

SEQ ID NO: 100 - DNA, 2561 bp, Homo sapiens
gatcctttaaaccttgattccatacaacacatgtttttgtgagctcaaatttggggcaaagtcacaaattaacagcatctcagccaaccaattgttcaaggtacaggtcaaaatggaatttcttatgtcttccctttctacacagacacagtaacagtctgatctctctttcttttccctacaggattgcaggcatgcagcaccatgcctggctaattttgtatttttagtagagacgggatttctccatgttggccaggctggtctcaaactcctgacctcaggtgatctgcccaccttggcctcccaaaatgctgggattacaggcatgaaccaccgcgcccggccatgctaagtcctttcttggctccattgtgctgtccctcctgcttcctctccaggtccatctgccacagtgctacgtgcaccagcgtgccagcaacagtggctggtctctgccccgtgcctcctccactgggctcacacctgtcttattttgtcctttggtggctctgagaagcagcctctgcccctctccctttcccttactctttgtaagatcctcttccttctgccctaccatgttgcttggacaccagggtggaatagcagagaacggctgcttgtgtttgaattccagctctgccacttcgatagatttctgaactgagacatgtgactctctaggcctatttctgcatgggtcggagagtgggcgggactgctttactgagttatagtgaatgtagttttaacctaagcgcctcacatgactaactcctcatccatcaagaatgagctcagctctcacttccccactcctcacccccctgtaaagtaacctttctccaaggttatgcttcaacaggaatagctaacatttattaaattgtggcacgtaagtatcttggatatattggctcattgaatcctcacacctactattttacagagatgccagtggggcttgagattgaatcacttgcccaggctcccactgctggtaaacagtagagggggctcctgacccatcagtctggcttgacaacccattccctcaactgcggatcccggattcccttatcaccctgttgatttctccatagctgtggtaacatttgttgcatgaatggaccgttgaaatagggcctggcagggagaaattcaggaaatgaatgaatggttcttccctggcagccttgatgacttacaagccctcaaggggaagcattttctcctggactccttgatgccggagctgctggtgtttcccgcccagacagatctgcatgaacacccactgtaccgggccggacacctcattctgcaggacagggccagctgtctcccagccatgctgctggacccccgccaggctcccatgtcatcgatgcctgtgcccccccaggcaataagaccagtcacttggctgctcttctgaagaaccaagggaagatctttgcctttgacctggatgccaagcgggtggcatccatggccacgctgctggcctgggttggcgtctcctgctgtgagctggctgaggaggacttctggcggtctcccccttagatccgcgctatcgtgaggtccactatgtcctgctggatccttcctgcagtggctcgggtgagatggtgagaaggcgtggctgagggactcggaggtccacagcagcttagacctggagtcatctgttttggtcttagttctgacactttaatgggcttgggaccctggagcaaagttctcctctgtgaggcaaggatttcaggagcgaggatttcaggactgaggcagcctgtgaagctgtgtaaccgagacacgcttttccttaggtatgccgagcagacagctggaggatcccggggcagggacacctagcccggtgcgtctgcatgccctggcagggttccagcagcgagccctgtgccacgcgctcactttcccttccctgcagcggctcgtctactccatgtgctccctctgccaggaggagaatgaagacatggtaccagatgcgctgcagcagaacccgggcgccttcaggctagctcccgccctgcctgcccggccccaccgaggcctgagcacgttcccgggtgccgagcactgcctccgggcttcccccaagaccacgcttagcggtggcttcttcgttgctgtaattgaacgggtcgagatgccgacgtgagtgagtgggggcatgcttgggaggcgcaggatggtactggcacatctaacatctacacttctctagctcagcctcacaggccaaagcatcagcaccagaacgcacacccagcccagccccaaagagaaagaagagcacagcaaagagccgcagccggtgcttgcacaccgccttgcacatagcagaggctccaggctgactccttcctggtgggaaaggaagatgcctgtcctctccgtggaggaccctgggccctcaccgcaggcagcagtttgcattttgaaaggttattgggtcccttcctcgggctgtgttcttgctggtgagcaaaagtgttgcctgcagaaataaaatgcagaacgtactc

SEQ ID NO: 101 - DNA, 2041 bp, Homo sapiens
  misc_feature 2004,2005: n=a,c,g, or t
gccacacacaaccccaatttttgtttaaaatttgcatccacattaacaaaacttttattagaaaaattcatttaatatctaggcaaaattatatcactttcaaaactttttaagtaaattcagtaacatatcaattcagtttattagcatcaaatttgatgaaacagtgcataaatggaaacaaaacagtttatcaatacaatatatcattcttcagaatttgcttaatttttgcagccaattaatacaatttaaaattttgtgcatattgtctcaattgaaaaatgtgagtgaatctgttttaattgtaataagaaatgtttctaatgtaaataaattcttttaactgtctagccagaggtcacaagtttttccaatttagagagcttcaaaattagcttgttcataagcagcgtgaaaatagggagaaaatgtgaatcacagtgctactttttgtctttgattgaatatttggtaagcatttcttttgtttcaaggaaatcttgaattggattttctagtacaggaaatccttataaaattcttttgtaagtcatccaggtaacattggtaaagaaacaagatcattagatacattgtctttttttttcagaagtttcataaactgtcaacattctatagcttttgtgcatatgtactgaagaattataacacatgtatccgtgactcgtttcttggagtctgcttcagaaaattgaacacaaatattttcagtatgtatcatgcaatagaatagagcaatgagggaaaagttatcctcttgctttaaaattccaacatggatggtcttttgacttaacttagctggagttccatccttgtgatagaaactaacttttctgtctctaactgaaattctttgacagatggaagattgtcaaaaatatctgccatgagtttgagcctttaggcaatgaattcacatttcattgcctttacatgaatcgacattgtaaatttggaggttctttgagacagaatatacccagagttttctttgggcagtgtcttgtatcaaacagttcatctaaggctaaagaaaaatacttgaaatttttcaagatttgaattaattggtctttattattaaaatataaatattctattagcaaaaatatattctgttcatgtatatccaagagcaaaattgtttaatggtttcattgacgttttcagttttcatgaatgtcttttaaggtcttttcctcataattttctaaatacgataaagtgataatttcttcatctctccatctaaggttctttgtagatgcatgtgtaagaagctattttatagcttgccaggtttacaaactcagacccttttaaaagttgtttaaattgttttgttagaaatttcactcgcagttcatatgagtaattttgtgtattcttttttgacttacactcactaaatggttgctaaaaattacatgtcttaaatattgtcttaagtattatctactatgtatctttaacacttttgaatagaacaaacagcttttccattttgctctgctgcagtaaattgcaattgccattcatcattaaatgtgcactatactgtctctagtcttcttgactatgccagttgtagtaccagcttctgtatctgcactgaattctgcctcagtaatatgcctttgtttaaaatttaaatattttttcatttttttaacctagaaaataattataatgaaaatattaagtatctcattttgggattctgatttacataggtatcactgtaacttgtgctgtttgcataggtatactctatcttgtgctatctgcataaattatccaagtaaacacattgtgattttacatccgtgcatagaaaaaaaaatcatctgaactcaaatcaatctgttgatactgactagattggtgacgtgtttatgtgtaacactagtgataatgcacgttcctgtacaagcattataatacaacagtgtcctatgcaatgcagtggttaaagtnnaattgtagttctatcaaaataaagatacgtttagcg

SEQ ID NO: 102 - DNA, 2135 bp, Homo sapiens
  misc_feature 2100: n=a,c,g, or t
gtgtggactgttataagaactactcagtgttttgttcctgggcaaggaaggtaggagttctgtgcacttaaggccagtggtcacaaacccttgttttatttaagagacagaggagaaagtggagcggggagggaatcctagcttattttcccttttctatgaggacttgacacaggttctgctgagttgtcactgctgctccagactcacctagagatgctgcctccactttccatcctgtctgggtctgaaaacagtgggtctgcagatagtgcccacaaaccccatgtgactggtttgaaggacccagagcataaaggtctctcaggaaaccatgtccaaaaccctagcagcggtacagcatgctgtctccaacccttatccccaggtttaagggtggtttatggccatacgtggaggttttttgttgttgtttttgagactgagtttcactcttgttgcccaggctggagtgcaatggcaccatctcggctcactgcaacctccacctcctggttcaagcgattctcaggcctcagcttcccaagtagttgggattacaggcgcctgccaccacacctggctaattttgtatttttagtagagatggggtttctccatgttggtcaggctggtctcaaactcccgacctcaagtgatctgcccgccttggcctcccaaagtgctgggattacaggcgtgagccaccgcacccggcagagtttcataatgaaaaattaactaatattctagtatgaagtgaggaggatactgaacaggatgtggctaaagccaacctgggacagccatggcgtggcttggtttcttcactccagtgttgtccctaccatttcgcagcattgatttaggaggctctgggacaaaagagaagccaaagagcagttttcccagttcactcactctggcaaaatcaggaaaaaaaagtctgttttgacatcaaattccactaatttggggcagcgttgggtgaggaaagtattgtgaagacaggcttcttggagtaggggcagccacaattcagtagacactctaggctcggaggctgccactgtagttgccaagctcaggttgggtggttctgtgctgtatggatggaataggacctgggctggtcatcttcatgtcgtttcctctctgtatcaatggaagttcaacccgcccctacctcttcagatagttgtaggccacttttctcttgtaactttggaaaacaaaagaggagaaataagtatcataccatatgcgtgtctccaaagtggatgtggttgcctcaaggcaggtggcaggcaggggtgacctgctggccctcagatcaatggtcgtggcaggtctaagagcttgtcccattggccagatttctttccagcagcaaagccagcttggggtttgcatgttgatcctgagcaagcttaacggggtgaagctgggctttctcccccctgtgactggagtgcatgttgacaccagcactttttctgcacatgtatcttcaatccaacaaggccgtttttttaatgctgagtaacaggccaccaagcggctactgcgttatatcttctcagcaaccggccgcagtctcttctgcaccattttctacaccagacctgcttggcaccacagggagctcttttcctgccctgcacaatgacattccaaccaccaccagccagacattacagccaaccttgctgattgtcacaagcaggaccttggggccactggcactgtcagatagtaagccatttcttgggtagaggaggaaactcctctccacaaatccacttgggcctgtgcaaatggcacttgaaagagtccccatgcacttggagtccatgagccaatgggatatgcaaagacgcttaaacatttcagggctggtttctctgttcatatccaattctggtgcttaggaacagggacccatgctgatgcccaagggcaaaaagccccacttcctttaaggaagtgaacaggcctgaccctgatgcccaataacgggcaaccctaggctttttgtttttcttgcttttattcctttttgttgttggccttgtgctgcgtttgtttacaaaagatgtnttttgtttaaccaaatattaaaaatggaaaactcc

SEQ ID NO: 103 - DNA, 1969 bp, Homo sapiens
cagagagatgaggaaactgagacccagaaaggtggaagcacttgtctaaggtcacgcctccaggaagcagtgtgtccacgactccagtccaagtggtcaggctccagagcccacagtcccaggggtccatgatgccgagctgcaatcgttcctgcagctgcagccgcggccccagcgtggaggatggcaagtggtatggggtccgctcctacctgcacctcttctatgaggactgtgcaggcactgctctcagcgacgaccctgagggacctccggtcctgtgcccccgccggccctggccctcactgtgttggaagatcagcctgtcctcggggaccctgcttctgctgctgggtgtggcggctctgaccactggctatgcagtgccccccaagctggagggcatcggtgagggtgagttcctggtgttggatcagcgggcagccgactacaaccaggccctgggcacctgtcgcctggcaggcacagcgctctgtgtggcagctggagttctgctcgccatctgcctcttctgggccatgataggctggctgagccaggacaccaaggcagagcccttggaccccgaagccgacagccacgtggaggtcttcggggatgagccagagcagcagttgtcacccattttccgcaatgccagtggccagtcatggttctcgccacccgccagcccctttgggcaatcttctgtgcagactatccagcccaagagggactcctgagctgcccacatggcctaagatgtgggtcctggatccttccccccttctcaccataaccccctctcagtgtttccccaacttctcccttttagcagggtccctttagagcccaactccaggtcaaatctggagctcaaatcccagtgctccctccccaggagtggggccccaactcttccaagataccagcattcctcaagtcctcccaaaacttcctacccacaccctcttcccaaggccctcaggggcagaaaacatctccttcaacccgtccccactccttcctctgcatgaccttgggcaaacccttgccctttcaagccatcagctcctgcctctctgccatgagggctttggatcagattcctcttctcgccaggatgaggacacgcactgccctccatagacacagatgaaggggtgggggtcattcagctcgaatgggtcccagatgctcacttggcctttccctgcaggatgagtgaagacgtttgcctctcacagtgtgtcttctacctgcattttggcatcagagccccccagcccacccaccacaggcaattactagccctagttgataggtgaggtgggtgaagaaggctggaggtgacatgtccgaggtcacacaacaaagcagcatgcaggaactagaaacacatcttcagcctcctcctgggccagctcttgtgctacaggtggggcggagccagcccctcaccttcctggttccctgagggtcctcagggtggaggacaggtttggcccagaaagactagccagaggcctgatggtcccaggtggctctggatatactttggatatggatttaaatggtctctaagagccgggggtagggggcaggaaaagtgggttgtctttgcccctcaaagtccacctacctagaaaccaagcccacggtcttggccgtgaccctgataataaatgtgctctctcagaggcgccagcccctccctccccagccggaggcgtcatctctcttctgtaccactagagggagctctgatgcagctggagagcagcgctcaaggctctcgcccctcccctccctaacccttaccttcagtctccaccagcctgaagggcctcctaggggatcctcaggcggcccccaccagggcacaccctactgtccttgtgcctcacgccccctcctcatcctgcaccccttccatcccaccttccctttcaataaacagctgggatgg

SEQ ID NO: 104 - DNA, 2203 bp, Homo sapiens
tgcatcttactgaggacacctgaccttttgaagcttcataattcacatctagatgtcaccggtctttcccatgttaacagttctgaccatgttttattatatatgccttcggcgccgagccaggacagctacaagaggagaaatgatgaacacccatagagctatagaatcaaacagccagacttcccctctcaatgcagaggtagtccagtatgccaaagaagtagtggatttcagttcccattatggaagtgagaatagtatgtcctatactatgtggaatttggctggtgtaccaaatgtattcccaagttctggtgactttactcagacagctgtgtttcgaacttatgggacatggtgggatcagtgtcctagtgcttccttgccattcaagaggacgccacctaattttcagagccaggactatgtggaacttacttttgaacaacaggtgtatcctacagctgtacatgttctagaaacctatcatcccggagcagtcattagaattctcgcttgttctgcaaatccttattccccaaatccaccagctgaagtaagatgggagattctttggtcagagagacctacgaaggtgaatgcttcccaagctcgccagtttaaaccttgtattaagcagataaatttccccacaaatcttatacgactggaagtaaatagttctcttctggaatattacactgaattagatgcagttgtgctacatggtgtgaaggacaagccagtgctttctctcaagacttcacttattgacatgaatgatatagaagatgatgcctatgcagaaaaggatggttgtggaatggacagtcttaacaaaaagtttagcagtgctgtcctcggggaagggccaaataatgggtattttgataaactaccttatgagcttattcagctgattctgaatcatcttacactaccagacctgtgtagattagcacagacttgcaaactactgagccagcattgctgtgatcctctgcaatacatccacctcaatctgcaaccatactgggcaaaactagatgacacttctctggaatttctacagtctcgctgcactcttgtccagtggcttaatttatcttggactggcaatagaggcttcatctctgttgcaggatttagcaggtttctgaaggtttgtggatccgaattagtacgccttgaattgtcttgcagccactttcttaatgaaacttgcttagaagttatttctgagatgtgtccaaatctacaggccttaaatctctcctcctgtgataagctaccacctcaagctttcaaccacattgccaagttatgcagccttaaacgacttgttctctatcgaacaaaagtagagcaaacagcactgctcagcattttgaacttctgttcagagcttcagcacctcagtttaggcagttgtgtcatgattgaagactatgatgtgatagctagcatgataggagccaagtgtaaaaaactccggaccctggatctgtggagatgtaagaatattactgagaatggaatagcagaactggcttctgggtgtccactactggaggagcttgaccttggctggtgcccaactctgcagagcagcaccgggtgcttcaccagactggcacaccagctcccaaacttgcaaaaactctttcttacagctaatagatctgtgtgtgacacagacattgatgaattggcatgtaattgtaccaggttacagcagctggacatattaggaacaagaatggtaagtccggcatccttaagaaaactcctggaatcttgtaaagatctttctttacttgatgtgtccttctgttcgcagattgataacagagctgtgctagaactgaatgcaagctttccaaaagtgttcataaaaaagagctttactcagtgacttaatatatgttctgtattaaaattaatgtgctttgttggggtttaattttgggattggttttgggttttgtttttagttgttttaatggtaagaattaagacatttgtagattttaaagaaaaatatgaaattgtccattaaatcaagtaaaaatgtgcacaaatgttttcataaaatactgcaagcacttctcttcaagaatatgagtggatattatttttaccttatgttaatcagtgatatgctttagtcaataatatgattgataaaagaataacatgg

SEQ ID NO: 105 - DNA, 2090 bp, Homo sapiens
gaggatgcagccgtggacgccgcggcaaagccctcaggggctcccctcttagcaggaaggcaggcaatgaacgcaggaacaaatcaccgagcatcaggtgctgggtggccgtgacacgagctgtgaagaaaaggaagtgcaagggatacggacgccccccagcgtccacgcggagcatgaacattgaggatggcgcgtgcccgcggctccccgtgccccccgctgccgcccggtaggatgtcctggccccacggggcattgctcttcctctggctcttctccccacccctgggggccggtggaggtggagtggccgtgacgtctgccgccggagggggctccccgccggccacctcctgccccgtggcctgctcctgcagcaaccaagccaaccgggtgatctgcacacggagagacctggccgaggtcccagccagcatcccggtcaacacgcggtacctgaacctgcaagagaacggcatccaggtgatccggacggacacgttcaagcacctgcggcacctggagattctgcagctgagcaagaacctggtgcgcaagatcgaggtgggcgccttcaacgggctgcccagcctcaacacgctggagctttttgacaaccggctgaccacggtgcccacgcaggccttcgagtacctgtccaagctgcgggagctctggctgcggaacaaccccatcgagagcatcccctcctacgccttcaaccgcgtgccctcgctgcggcgcctggacctgggcgagctcaagcggctggaatacatctcggaggcggccttcgaggggctggtcaacctgcgctacctcaacctgggcatgtgcaacctcaaggacatccccaacctgacggccctggtgcgcctggaggagctggagctgtcgggcaaccggctggacctgatccgcccgggctccttccagggtctcaccagcctgcgcaagctgtggctcatgcacgcccaggtagccaccatcgagcgcaacgccttcgacgacctcaagtcgctggaggagctcaacctgtcccacaacaacctgatgtcgctgccccacgacctcttcacgcccctgcaccgcctcgagcgcgtgcacctcaaccacaacccctggcattgcaactgcgacgtgctctggctgagctggtggctcaaggagacggtgcccagcaacacgacgtgctgcgcccgctgtcatgcgcccgccggcctcaaggggcgctacattggggagctggaccagtcgcatttcacctgctatgcgcccgtcatcgtggagccgcccacggacctcaacgtcaccgagggcatggctgccgagctcaaatgccgcacgggcacctccatgacctccgtcaactggctgacgcccaacggcaccctcatgacccacggctcctaccgcgtgcgcatctccgtcctgcatgacggcacgcttaacttcaccaacgtcaccgtgcaggacacgggccagtacacgtgcatggtgacgaactcagccggcaacaccaccgcctcggccacgctcaacgtctcggccgtggaccccgtggcggccgggggcaccggcagcggcgggggcggccctgggggcagtggtggtgttggagggggcagtggcggctacacctacttcaccacggtgaccgtggagaccctggagacgcagcccggagaggaggccctgcagccgcgggggacggagaaggaaccgccagggcccacgacagacggtgtctggggtgggggccggcctggggacgcggccggccctgcctcgtcttctaccacggcacccgccccgcgctcctcgcggcccacggagaaggcgttcacggtgcccatcacggatgtgacggagaacgccctcaaggacctggacgacgtcatgaagaccaccaaaatcatcatcggctgcttcgtggccatcacgttcatggccgcggtgatgctcgtggccttctacaactgcgcaagcagcaccagctccacaagcaccacgggcccacgcgcaccgtggagatcatcaacgtggaggacgagctgcccgccgcctcggccgtgtccgtggccgcc

SEQ ID NO: 106 - DNA, 1786 bp, Homo sapiens
ccgcttttttttttttttttttttttttttttttgggacggagtcttgctcttgtcgctcaggctggagagcagtggtgcggtctcggctcactgcaacctttgcctcccgggttcaagcgattctcttgcctcagcctcctgagtggctgggattacaggggcgcgccactatgccaggctaatttttgtattttttgtagagatgggggttttaccatggtggtcaggctggtctcgagcgtctgacctcgtgatctacctgcctcggcctcccaaagtgctgggattacaggcatgagccacctagccccactttaagtcttaaaaaggtacaagaactgtggggttattatggctggcactgctctgattggtcagtgccactcctgtttggtgccccctgctgttcacgttaaatgtcttcactagtatccgtcttctaactcagcgcgagtcttgttgccccgccaagtccgtgctgcatctttccctgggaggctgacatttctggatcaaggataccctaagtcttacagcttgctgttgggtttgatcactgaagggcaccagcaggggactgaaaatcagagaggaggtgtcggggtaagtaaattagtcccctgcctgccttttgcaacagccagttagtagctatgttcctccacaggagctgcagctcccaccagccacagccacagccctctccgtgattccaggagccactggtccacgtctaccttctgccctggcggtggtaagagccccagccaaggacagaatgcacctacgcctttttaagtagaccctaaatccatctcttcctaccaggacatgactattccaagcacttaaaaaaaagtggaggtggaaagcagaatgttataggtagtacattagtaaaataacaataaacagtgacaacatcaacacagacttctttcttgtttcattcgaggtgatatgtagaaacagctaaagcagaccacctgccttctcttccttttctctccctgcctcttttcttccttttcttttactccctcttttttcttctctcctccatctcattctctctcctctccttccttcttttcccccttattctctccctctctctctccttccatccttcagccccagtagggcctattctgtaccagggcctgtgctaggcactgaggaagcagaggtgagttaggcagtctttgccttcaaagagatcactgcctaggacttagccatcacagtagtgcaaagtagactggactgaacagaagctcctgagtctgcaaagctaggtcatatccctgtctgtcactcactagctgggtgaccttgggcatatcagtctaacttacccaatactgtccccatatctgtaagagaggaacacttcctacccacctcacagagttcttactgcgttcaacaagataatatatgcaaagcactaataccagcccaacatatagtaaggactgagaaacagtgggagttagctcccttcttcagtggagggaaagaatgacaatatcacttagtggtgaagagtgttaagattgtaagaggagctacttaacctctgggtttaaatggggttaatataaactaccttcgatcctatctatattttcccaggagtgttatgacagtcatatgtgataacgtgtgtaaggctttagattataaaaatgataaaagtatcaaccaaataccatcacttattattacataatgttgatttatatttaaaaaagcttttcagttgtttccttcaatcactg

SEQ ID NO: 107 - DNA, 3172 bp, Homo sapiens
gctgaaggactgtccccgacgccgggccgtcatcctgaaattcagccttcagggtctcaagatctacagcggggagggtgaggtgctgctgatggctcatgccctgaggcgcatactctactccacctggtgccctgccgactgccagtttgccttcatggctcgaaacccacggagcccagccagcaagctcttctgccacctctttgtgggcagccagccaggagaggtccagatcctgcacctgctgctgtgccgctctttccagctggcttacctcttgcagcaccctgaggagcgggcacagccagagccctgcccagggcccacaggggaggtgcccctgaagccactgtccagctctgggggcctggtgcgggagcccttcggccgtgatcaactctctcagaacgtccatgccctggtctcctttcggcggctgccagcagaggggctggtgggcagtgggaaggagctgccagagtcggaaggccgtgcccgccatgcccgcctggggaatccctactgctcgcccacgctggtgcgcaagaaggccattcgcagcaaggtgatccgctcgggggcctaccgcggctgcacctatgagacccagctgcagctgtcggctcgggaggcctttcctgccgcatgggaggcatggccccggggtcctggtggccactcgtgcctggtggagagcgagggcagcctgacggagaacatctgggccttcgctggcatctccaggccctgtgccctggccctgttgcggagagacgtgctgggggccttcctgctgtggcctgagctgggtgctagcggccagtggtgtctgtccgtgcgcacgcagtgcggcgtggtgccccaccaggtcttccggaaccacctgggccgctactgcttggagcacctgccggcagagttccccagcctggaggctctggtggagaaccacgcggttactgaacgtatcctcttctgtcccctcgacatgggccgcctgaaccccacctacgaggagcaggactgtgggcccccaggcaggccgccccggactctccggcccctcagccatgccaagtccgaggcagagctgcagggcctgggctaagaggtagggccccggtcccacaggccccgcctcaccccggctcctgggccccagcagcatctctgcccgtcctgcacccctctggttgccagttccatccagtcaccctgcccttggagcagtcttccatcgcgtcactgtccgtgggaggggagccctgagggtgggtatcgccaatggcttcttggagaacatgtggcctgctgagattccaggagggcaggtggagttgcaggcttcggataaccctttgggtggcttcggatgacctgctgtgtggcttcggatgctttgggacttctgggcttctgctttactcctggggcaggagcttgttcacggcaaagctgcagccctctcctaaggaggctaggccttggggcgctgactgggagtctccagaaagagggttttggggaggcaggagtgagcttttactctgggcaaagacctggagtgagccaccctgtctatgagagcagagatgactccatggagcttgtgggcaggaggctggggatgagccccatctaggctgacagagcagggctgtttctcacatgtatctgagagtgaaggaggggtgggaaggtgcagagagggcaggagggacagagggctgtacctaacgctcacgcacggtggactcctgtgtgcagaaagggatgcgcaccagcagacagggccaagaatctccatgctgtctccactcaaaacctcagggctgtgactcccgctttctcagaagggatgcgcaggctcaccccttccccctaggaatcaccagggcacccccacccccagctcatctcctttagccatttgacagggaggggccagcagtgagctgcaggcttagaggggtgaccagggcccttcctaactcgaccgcatgtggtttggtggctgccttgggagggaggctgtccgatgctgacattccccttagcatggccctgaccgtggctgtcaggggccaccttgcctcaccaggccagccccactgggaatggggtcagtcacagcagaaccgtcgaaaggtggacctgatgtgggccctgccgggggcgcttggcctcagcgggccatgggagacccagggaaacgactctagtgtgaggcagtggtcctgccagtgactgacaaaccctctttgtaagcaaacttgacaaataatgaatctactgaactcagttatagaacaagttcattttgcatgaacttctcttattgaagcagaagccacgtcatgagcctgggggctgccctctccccgtctgggagtgggacagaactgttcagtgccttgaaagtcacagatttctgactcctggaaggaactgggcagtcccaccagagcagaaagaaaggaggcaaacttggggagtgagaagccagcctcccagaggcccaggcctcgtgttccccacctccaaccctcccgtgaggagaggggcttggcctgggaccttgtaacttccttgcaagttaagtgagctatcctgtcacaaaagatagaaggaactgccctttgggacttcttttcactggaaacccagcactggttttatgttgagtgagtgggaagctgggactctgttttacagccatctgtactggagcctggacaaaccactggtctctatgggaggccccagcctcacatttccctggcaaggagagagaggtttagccatgtcctgggtctaggattatagcccagagatgggcacttaagaagacctggtcattggtccagacttgtgccaaggctctcttctgtgagggatgggttttactggtgaattacctgtgtggagaagctatcagggctcatgtttagcacactgaagggaccagtctccaccaagcactttaacatccctccagccagcatagattgatctcgtgttacagagagggcaaggtttttggcccctgtttgcagactccatgtcttaatcagagaccacagttttctctttgttccaatctgcgccacctcggtcgccccactttccttgctgtgtggacttgaaacaaaataaaatgtgttgcttc

SEQ ID NO: 108 - DNA, 2538 bp, Homo sapiens
gggaaagcgtttatactctctccttccagttctaactcctaggcctcaagttgctcctttgggagaaaaaaattgtaatgcttaggattttactatttagtttggtgggaacttcattacctttttctttggactttcttcttatttttttaaaaaaattcttttgtgtggacgaaagaggcttggatattacttcctcaggtcaaagacttaaatactacttctgggtctacatttccgtgattgtacattttttccccactaatcacctatgacacttctgattttagtttgcagacaaattttcattccacttaaaaggccgaaaacttgaacaaccaatgaatttaatcccttttgtggaaactgcaatgggtttgctcaattttaaggtaaggaagccataatagcggttaataagttagcattttatttatcacctaaagagaacttttgctttcaattttaacatcttcttaaaatgtgtttctagaaagatttataagcaaaggaaatgttgagcaccatttgttatctgtaatagtccaaaaaccaggttgccagcatcttagaaaacaatgaaatcagttaggtagaaggaaaagcttcccagtccaaaatatttaaatgaagcatttgtatattcctagtaacaattttaactaatcactgtgtaattatatgctttgaattattgcatttatagactaaatgtacatgaaaatttgtcacccttatgaattaactttgaaatgttcttttctatcaaatgtcttttcagtgggaaatgttctgccctctctgtagcaacattatcagtaatgtctagcagagaagattattgtttgtaagttcatgcacacaaataatttgcagtacagtttttcagtttgccacattagaatatcttctaatatacatgcgggaatattggctgagccaagtgttttcagccgttgtgtggttgcactaaactaccggtcttaacaaattcagagctagctcgttttttctcgtttatcagggggcatttatattattttccaaaatatgcctctcattccacctgacctgcgaacatcaatctagcaccccctttcagagttcctagattcccttcccccaccccagcccccacagagggcaggagaaaagaaatcactaaaaacaacagaaaaaacatagtcgaactgtactggagagagaatgtgtgagcggcaactttgaggccttgggatgtgcagaaggggtcgagtgcaaatgtttggggacctgcttcaaaccttgtcctgtgagcagcttgtttacacaactaaccatacattcttccagccagccccagaatcctgagaatataatcaaaagcatatccctaagatgcaaccagattcatccagtgatttaattttaagcactgcttcgccattttattccataatgtacttagaagcacttacaatgtctgaaattaatcaacagtgtccccaccggttcctcgtttctttcccacccacgtatattattagcaggttatatctccacctttcaagattcacggttatgtctacgacgaatggtatttgccttgactttcatatataaatgtcgaagttgctttatgaacacatctttggatgacttgttgcatttttattttcccctccggagttgcaggtttttgtgctgtctttaatcctgagaccatgtgcttgatcctaatgcaaataattcaattagtttgattttaaaattccttccttctcccctgtggttttacgagagtctcttaaagcaaaaacgaattctggaaagatataaataacttatagtgcaagcaaaatgagttaactcaaagtttctccaaaaatgagatgaactacaatttgaacattataactatattcatataatccattaaacaaagcaaatatatacaatatacttatcttggatgatattaaataccttttgaaaggggtaaatttgggctgcgtttttaggactgctttcagccaaactgtgttaagagtcaggtcgtcctgttactgaaatgcaccgtgcctcttccctctgacgcacgcgtttccgtgagacttagttctgttctgctcttttacaggcagtgtgtgaagaaaccctgaaggtcgggcctcaagtaggtctctttctagatgcagtcgtttttggaggagaagactttcgagccagcataggtgtcaaagacatctctctctctctttttctgtgtgtgtgtgtgtatatgtgtgtatatattttttctttgcccctcaaggatggacatttacataacaatgtatatttgccaaccatgacaatggtttttaatgacaatggaatggacactacttcctgataatttagggctcctcatagctgccctgcttctagagcactgcattattacttctgttcatttataaaagacacgagcaatagaaagcctgttgcagcgcccaggcatgctcaggaatatatggcatctcctttgctcctaataaatatattatgtgaacagcc

SEQ ID NO: 109 - DNA, 1606 bp, Homo sapiens
ggactgctctgaggcagcaggcagccctgcccgaaaggtgaagatgcggcggcactgagtctacccgccgccctcctgggaactctggctcatccttacgtagttgcccctccttttgttttgagggttttgtttttgttcattggggggtttttgttttttgttttttttgattctatatatttttccttggttttgttgcctgttaaggctgaagaatagaattggccaggacctaggttctcatattcttggtattcctcctggatggaaaggctgttggcatcaataggggacagaggctgatgctggagtggccagtagaggtggtggagcagagcagccatcttttaagtggggctgtatcaggctgggtttatttaaaagcaacaaaatgttttggttaagaaaattattttgctttcagtgtaaatcttcgcagtgttctaaacaaagttcagtcttctgctcgcccctttccctcactgatgtctgcacttggttgaggtctcctggagcctcacaggctctgctgttctccacttctcacctgccatccacgccctgcaagctcatgcaaacaccctttcttcctcctgcggcagagttgttcaggttgcctgggcaggggcttaaacagtgccagcccctgccatcccaaagctattgttaagccccccaggcgtcctccacccacgcccactagcctgccatgtccacagttccttgggctgctgaggggctagtgcagtggtcctgacctctcttatcaagagcacacttctttgctggttgctccttttgagcatatgcgtgtgattatttggaacagttagacttgccacgttgggtcagttttagaaattgtttctagctagagggactggtgtccttccaagtctagcatttggggtatggaaaattgttgtggtgtgtggtagggtttttgttttcttttttgagttttttttccccctttagtctcctggctttttcctttcccttcccttctccactggccagcttgggcctcatcctcatgtcatccttctaggaaggcgcctgccccatcttgtctgccggcagcatgcatccaaggccagagctcaggcctgcagactgggctggtgcctcctccgcttcagggtatgggagttggtgaaggggctttcaaaaaataataagaaaaaaaaggtaaagtctttggtagcttctatccactcagatcctggaaggcagcaaggttttgtggatctagattcattaggaatgtcttcttgtcagccaggccaggacccgggcttgccaagagcagaggccctcccagcaaccaggataccaccactttgggggctttgtgtacagaggtccgggtctgagacctcataggctgcagaaatctggggcagccaccatcaagaagcccctctcaggggccagaactcctttgccagcgtggatttctcaagtcgggactgcataattaaagcagttgcagttttattttttttacagcttttttcccaaaaatgatttgtagttgtgtgtgcagcacttcgccctgatatgtgtgctctacaataaaaaccaaatctaatatattttg

SEQ ID NO: 110 - DNA, 1997 bp, Homo sapiens
  misc_feature 1985,1989: n=a,c,g, or t
cttctgggtggtttgatagtgtttttaaaagtaatatataatgtggggtgaaatgggagtaggggggtggacaggggagaaacgaaaaccacaaaaagaaaacccaactcctctcctccccccaagctcagttaaatcccccacctccaactttccctccaccagtgtgcttgggatcttcaatgaactgtgcttttcgctttctttctgcatgactattgtaactagatagaacattaagagattttcaagatcaaacttccatagcttcatccactgaatttgaaggcatccacctttttctccatttgctaaaatttggtgcagtttgagtttatgtgaataggctggctgtgcctgtagagctcttgtgtttttagtgatgacatgaaatacaaagaacaagctatttccaggaatgtgttctgtattttacatcccagtgtaccctttattttattattaactaattaactatgagatttttaaaaaatggggccgctgatgtgcaatatcaaagtgaacttgtgagtattttgtgtgtgttgatctcagttgtttcttcattgttgctgtttctggatccagccatgtgtgcgcttgtgtggacctgaggctgctttctgttcccaaagcttgacctgtgtacagagataattccttggcaatgttggacatagaatgcagggagctactgaaggtctgtcagggatttgtccattctgctcttggcctctcctgaggcctcataatgggagaccaaatcaaaaatgtcccatgtcacttgagtgggtacactgcctacagaaccttgaggttgactcctgcttcagttctcagctgtttaccacagccctccagggtccaaagattgaggagctttctctttcctgggaggaactgtctcagatttagcttgtgtgtgttttggacagaggctccacagcggtggctcttgaggaatcctcaccagtttgttctcttccctctgacaagcagcacctgagcagatgctgaggcagttcattaaaccaggcctcagcttcagtgcctcatcttgccatctcccggccaggctgggaacgggcaccaagcagccgcctctaacaaacaccatggtccgtggaagttcatgccagcagcttgcctttgagaagaaatgctgctggctctatttttacattcccttccacctctatactgtcatgtcaccgttctgaactcccagatctgagaaggaactagtgttggtggtatgtaacaagagttacgtatccaggggcttgtgccttggtttctcctttgattgctggtaaattctgaggccacagagaaatgcattgagtgtgaatgttgtcatctgtaatccctccctcagctgataatggtagttgatctgttgtgaatatatgcatatatgcatatttgcacttccagatgggttgcataagaatcaggtccttaaataccccccaatctgatgaaacgatagaataaagtaacatttcccagaatggaggaatacattattttttcgtatatttttgtccaagcgatgggctgccggtggttttgcttctctgcattttttcagtgtgtacatctggtgcttttcatgtttcatttgtgagccacaaatgcaaagttgccatttgaattcagtcaggctacagggtggtgtcagtcaaggtctttcaggtgggggagaaattggttagggctcccactgccaaatgcaagcagatagcataacctgactgttttgtgccctcaggcagcatgcttagggacaactctgtggcctgggggacatctgtgtcacagtttaggattgccattcaggtgttttgtacctttttctttcctgacgttttcccctttttttgtactgatccaactgggagaacctcagccaatgctggaagtatgattgaagttcctcttttttgttacttttgtacagcttaatgtgcaataaaggaaangttntttctttc

SEQ ID NO: 111 - DNA, 1679 bp, Homo sapiens
gtctggtgcaaacctcaccagccccagggtgcccctttctgcctacgagcgtgtcagtggcagaacctcaccaccgctccttgaccgagctaggtccagaacaccaccgtctgccccaagccaatctaggatgacctctgaacgggctccctccccttcctctagaatgggccaggctccttcacagtctcttctccctccagcacaggatcagccgaggtctcctgtgccttctgctttttcagaccaatcccgttgtttgattgcccagaccacccctgtagcagggtctcagtccctttcctctggggcagtggcaacgaccacgtcctctgctggtgatcacaatggcatgctctctgtccctgcccctggggtgccccactctgatgtgggggagccacctgcctctactggggcccagcagccttctgcattagccgccctgcagccagcaaaggagcggcggagttcctcctcgtcgtcgtcgtcctctagctcctcctcctcttcatcatcgtcgtcgtcgtcctcctcctcctctggctccagttctagtgactcagagggctctagccttcctgtgcaacctgaggtggcactgaagagggtccccagccccaccccagccccaaaggaggctgttcgagagggacgtcctccggagccaaccccagccaaacggaagaggcgctctagcagttccagttccagctcctcctcttcatcttcctcctcctcctcctcctcctcttcttcctcctcctcttcctcttcttcttcttcctcctcatcttcctcctcctcgtcgtcttcctccccttcccctgctaagcctggccctcaggccttgcccaaacctgcaagccccaagaagccaccccctggcgagcggaggtcccgcagcccccggaagccaatagactccctcagggactctcggtccctcagctactcgcctgtggagcgtcgccgtccctcgccccagccgtcaccacgggaccagcagagcagcagcagtgagcggggttcccggagaggccagcgtggggacagccgctcccccagccacaagcgcaggagggagacacctagccctcggcccatgagacaccgctcctccaggtctccataaattgtctttgggggattccaccacacccaatgctctggagccacaaggagtgtcccttcttccccagcagagccgtgggagggtccttgtctgctctcctttgaaccttggcagcccttggatggagggctccctttccctccccttttttttttctttgttcctgtgaaatgttaatctccgtgagttcttcctggttcatgtgttctggggggtttggggtgggagggaatgcagatgggagttgggggaggggaggatacagttcaggataccccagcctggagtcagggccagggaggcatggccccacttgtatccagaagttcccaggggtgattgtgatggtggttggcactggaggttgtataaggtgttcttggaaggaaggggcaggagttggaattagttggtccctactgtcccccatgaggttgtgaacccctccccccaacttttcatgtttcttaaaggcattttggttttttaaaatctgtacagcaagagcgaactttttctgtcaaataaaaatgagaaatgcagg

SEQ ID NO: 112 - DNA, 2444 bp, Homo sapiens
cagaggttgcagtgagccgagattgcaccactgcactccagcctgggtaacagagactctgtctcaaaaaaagaaaaaaaaaaaagaaagaaagaaagaaaattggggataggagaacagcaaggtgggcatttcccggaattgtgtgcagatgcatccagtcgtggcattgcaagaagtctgtctgatgaagctcgggaagcattttgcaatattccctttggctgtgttcctgtgttccctgctcccacttttcttcccctggtttgtgattattaggagagaggttttgcaaagactcgttgctgtgaaagaatctttttttaatttttatcctagagtcagtcacttttattccaggtagtcatgctgatctgcttatccaaagccagctaaccaggttcatcctaccatcctcatggaagactgtgtgtatgaattggagtaacagaactgaaatacacttaaacagtgacagcagtacttcccagggtgggggccatatttctctgtgtcctactctgagcaacttctcagagatacgagggggctagggttttcccatctgggaaatggggtgaaagtctgcagattgttaaatgaaatatagaatcagagaaaaagaaaagtcagtgatataaatagatcatttcatagaaattagggtagatttttatttcaactactactggagaatttaataaaaggcattatttgaaaagtttttctaacatagatttagggtttttttttttagagtggacacactacatttaaaagcaattattttgctattcagattttttattatctgaaaatgaaattatctgttttacttttcaaagctttgtgaaacaaacttgaagttatagggaggtaagccatctccaactctgcaggtcaaacgaaagtttgggaaatacttttgacatcccacaatacagaatgtcttaacatgagaattgaatttcatgatgtgtggttccatttaatagcggacaccaccccaatctcatgttttcctgttaccctaaaacagtggaaggaaactgggtgtttggtagacttctaaatcatggtctctgacaatttgaatctgagattctcacctccatttactaaagaatcgtgacttaattcaaattgcacagtaatcagtaaagtgaatacgtttttaaaatggaattttctcccttcagcaagcactcattaaggagtgaggctgagtattttaagatagagtgagatctgtgagtgattgaaaggtgatatttaaaaacttggatttcattccagtgtcaggtttgggttttaagttcctttggtccagggaagggtccaagcagccacagttgccctaaatctccatcattaagtcttccagcaaggttaagtgcagtatggaaggagaagggggaagaggacggtaacggccccacactccaggctgagaaagagtaattaggaggcctgaggaggggccgaggaaaggctgttggggtgtgctggggttggtacccgagcgccttcccctcacctcaaccagagaagagcatccggttgctttttaaagcttttagcctgccctagcaaggacaaagcatgttagattagagatgcttctgctgatcgcaggggttcttatttgaaaacatctatgatgggggtggggtgggaggagacaggttgtggttatgcaggaaaatcttgtcctaaaaatatatgagtttgggggtaaggggtgggatagccaagcaaaatcagtaattattttaaaatgaacatatgtatttttattaacttttagttaaatacagattttacaacgaggtcagcataagcctaaatctatatagagggctaactcaggcattgtcttgtttatttgtagactggattaaaaacaacctgtcctgttttgtcagttcccagcttcttcgtttagaataaattagaccaaaagaagaaacgtgcttgtctctgtatacccgcagaatgaagttactgttgttaaaactggattttttcattttactaggttccgaagagtccagatgcttggtagatgttcaatacgtgattttttttttaattgaatgtgttcatttaaaatcctccttaacatttctagaaagacttctttcaataaataatggaatcttagaggaaaagtggttttttaaaagctagggaactcctccactaaaagtaaccattggaaacctcgaatgagggctaaagttttaatcataagagaaaaggcagcataatgaaatgtgtacacatacatagtcagtggtccattttagaaagccagtggcgtctgataaagaaatgttaagagtagtgaggttgaggaaggaaattgtggggatttgaaatattctctttatgttgtttctcttctgagtcatggtaaaacaataaattatcatctctaggtg

SEQ ID NO: 113 - DNA, 1389 bp, Homo sapiens
tttttttttttgatagtccagtagattctcaaagacctaaatacatacaggtgacctatatatacacacaaacaccaaaaagcatggttccagagctggcacagagtatccgagctagaaaagttaaagtgatcacctaattgaactcttcacagttgaagctgagagaggcaaaataacatgcttagaaccacaggccaagaagggtagagccaggactgaaacccaggtcttctcatctggggtgagggtccctcccagcttgtcacactaacctagtgaaaatcaacaagctaattgtgggaggagagggctattcaatgtttttacccactagcctggcacaagcaccaacgaatcagtgggcaatatcaggctgtacatggaaccattgcctcacggctgaatataggctatggctctctctacacctacagctacttggcaaagagctctagttcttaacctaatcatgatggtgatcagtgacatttgccaagtattccatttccttggagaaaattgtgcatttacacaatagcatgtctactctcacctctctcaattctataagcagagagagaaagtgtgcatgtgtctgagtgtggtggtagcattaagataccagagaactgtcatatgagaacaagatgacaaaaaggctgattgctgttaatgtgcattcatctgtcagagattgtgtaaaatgaaccccgtggttaaaggcattattcaaatcacagccacggccctggaacggacactaagtgtgggtgcaggaaacaagatgggcagctcccttttcccaagcctggcatcagaagagttagatctaggaaagacctgctagaccatctttttttctgggccagcaggacgatgaagccacactggagattacccaggacgtagtttcaaagtgagtcacgaggtcccatgcactccctcagggagatgctactccagcctggctttcatgtgcttagtggaggcagggaggcttctctccaggtgatacctcagcacacactgtgtcatgagatccaacctcagttttctcacatgcacaatggggaagccaccacacgtggtaaaggtacatgggagagacagtgaggtgagaaacaagactgtgctctaagggcaaaactatgaagttgccccatgatggacaacaacagaggtgtatgaagatacctgaaagggacagagcagcccctaggacagtaggtgtttacatttaacctaatcgaaagtcaacaggctgggttcagtggctcatgcctgtaatcctagcactttgggaggctgaggtgggtggataagctgaggtcaggagttcgagaccacctggccaccatggcgaaaccctgtctctactaaaaatat

SEQ ID NO: 114 - DNA, 2456 bp, Homo sapiens
gtaaagacggggtttcaccatatcggccaggctggtctcaaactcctagcctctactgatccacccgcctcggcctctcaaagtgctgggattataggcgtaagccaccttgcccagcctccagacgcattttctatacaactctgcacaggcaattttggcctcagagtcctccagcaggtggcagactccagcacaggaacaaaatctgtctaccccagaaatctcttccaagttgacacagccttcataagcaagagccataactgtgatgaatgcctgttgtcattttaagcactgcaagttattccacatgaatactgaactgtggtccaagcatacaggggaatgcatccccctttcaatcacacgacatccaacacatgccataggtgggtaatgtcaagcaatattcaccccccgcccctgaatccttcacttggtcaggagacaccctgtatctactgcaaagacttctgttttctcctcggttctgtattttcccaaattcctaccctggtacgtactatttttttctaattacaaaataatcattaacttttaaaaagccatgtacaactagttgacataataaaaatccacctaactcatcttttagtaactatggctatgttgtaacaattttattttgatttttaaaaaaggaatctcttgatttaatcagggctttggggtcatagggggattagtcactgtcacagtcataataatgcatttattcagggaaaactttaatcttctttgtcttctccaaaaacagctgctggaacacctcaaattaagggatgttcatctaaaacacctttactgaaacttgattccttgggccagaggaaggtctttactgtagttgatagtacaagtagaccttctcatgtactgtttccaggcatcactgccagactccctgccaccaccagtgtgcttttctcctccaaaggcacctccaatctcagccccacttgttggaatgttgacatttacaatgccacagtctgatcctttaggtccaagccagcgaaagattctgcccagatctttggtaaagatgctacttgaaagtccctgttttacttcattattccatgcaaagacctcttcttcattcttgaatttaaagacatagagaatcggagcaaaagtctctgtgtgtgcaatggacgcatcgtggccaagacctgtcacaattgtcggttctacataatttccagggcgatccataaccttgcccccatagaccactgtgccaccttctttctttgcttcttccactgctccaagaaacatgctcactgcctgcttggtgtggagtggcccatagagaacattagggtcccatgggttcccaactcggatctgtgcataggcctttttaagtctgtttacaacctcatcatggatgctttcatgtataaacagtcgcctcgcagtggtacacctctggccagctgttcccacagcagcgaagagagctgatggaacaactaagctgaggtctgcatcttcaaaggcaataatggcattgtttcctccaagttccaacagacttctcccaaacctctcctgcaccatcaggcccacctgttttcccacctgagtgctcccagtgaaggacagcaggttcactcgttcatctttggccattgctgtgccaatatctgctccaccacaagtcaaggaacaaattgcaccaggcagcttgttgtcctccagaaccttggctattatctttgtgacagccacactaatgagggaagtggttggagctcctttccagaggcagacatttccacagatcatggcgatggcgttgttccaaccatacactgccacagggaaattgaatgccgtgatgattccaaccaggcctacgggattccactgctcaatcagtgcatggccagatctttcagaaggcaagataggtcctccaatcatccttgataaaccaacagcatagtcacagatatccacatactcctgaacttcacccacaccttccactaagattttccccatctccaaagacaccaagcttcctagtacttggatcttctcccgcaaggcatcgccaatctgtcttactatttctcctcgttttggagcaggaatatctgcccagattttctatgcttctcttgctttctttacagtttcttcatagtctgccacactggcgtgtcggactcttgctattggctcgttgttagcagggcaataggtcgtaataacctctccccggcctccccagcttccattatacacgccctcgttttcctcgcggagccccagctctttcagccacgcatactggggctgattgatgaggagagtggacatgaaggcggcaggcctgctccaaggtccagagagcttgctggtctttgcagcgtgcacacacagcgcgcgaggaaggcgccacatactgagcccga

SEQ ID NO: 115 - DNA, 1632 bp, Homo sapiens
gggcacttttggaaaactgctgaaaaagaattagtttccttcatctgcagacctttgtccaatacggttaccatttctttatagtaactcgattagccatatctgtttgtttctagtcctgctcctttgctcctctcctatgccttcccagtgctggctccattttgaagactcaaggacagaggggaagcagatcataaagagaaaaaggagacagaagaaaggatgaaggaaggaggtcatggggagtgtggcttctgagcagtttagttgctggggagagcagacagtcactgcctacaatacagacagaaccttcctgctcactttctgtcctatctcttcctgaccttatgaaccagtgttagtagatgattaaaacatgacaagcaatggctccttattttcacaggactaagtccgggccttcgtatcactagctgttgccttttacaccctgcttcagccaccctgtccctgtcattggccctggacttcctctctgtgcccgtgtgtcctctgcctgggagccctctcctcccatagtcactttctctctgccaaactcatttcttcttgtgcccaagacctctctcctgagcccctgtggaaacttcaggaaggatgaatccgtctttgtgctccacggctcgtaccttgatcaggctgtgcatcacagtaattccgttctaggtaggcagagttgatctttgtctcatctgccaggctgcgggctcttcaagggcagggaccttgtcatagtcatttttattttcacagtgcttggaacatggtggaaaatgaatgttggaattattggagtaatataatttgtatcaaatgtccttttgaattaagagatttagttatgtttactaagaatgtaaactttgaattggtttgcattttaacaattaggatggtttattgatgtgaattttgaaatgtagaggtataatgttaaattattttatactttatggaaatcaagtgaaatgtttgaaaaaatgccgccattatcctctggtattttctactctctggaattatgtgctgtaaatgatcggctgtaaatgtgaggcacaccacccacccctgtgtggaaagtgttgtggcgcttcctgccacccacccacctctctgccgttgctccttgtgacacttgtctgtcgtctcccatccaaactccaagcttacagctacctcagtactgctttgcttgtctgaaacacctcctttgccttccttcagtgtcccgctcaggtgcagcctcctccctaaagctcatctcagcttttgatctgaatgatgatggaaacatgcagacagcctctcagtcttactatttaatgttgtagctgggaaaaaacccagagaggttaactgatatactgggttgggactaggatgtgggttttgtgactctgaatcccatgttctcaaactacgctgccttccgaagtctggcatttgttagctcatgcttccttgtagtccagcttcttatgtgcctgttatattctccagtaagattgtaagccccttaagggcagggacggtctttgcatctcttagcactgctatagtgttctatccttagttatgaactagataaataaatggtggggcaac

SEQ ID NO: 116 - DNA, 1673 bp, Homo sapiens
tggccccacagtcctgcccatgactggccttactgatgagagcatgccttgcattcctgtcccatgaaacatacttggatgccatgtctgagactgaacaggatggtggctgttgtcttgcctgtgatgcctcttacggaggcccaacaggctgtgtttgctgcaggccaggggcttggcttggctccctggctcctggggctgctgatcctacccttggtcagggctggagcctacaacttgtgtgaagagaggggccctttcggtcccactctctcgaagggaggaagtcttaccagcagacccttcagaccaaattagacgattggctcaaagaggagttctgtcctaatttgcaccacagtcctccatgactgtcccctttctcacatcttcccactcacccccaccctgctgggctggagcctatgacccgtcagctcctagtcactgccaggcagagccagctcttctcccagaggtgcatctgccccaggcctgtcagggccttgctgttgtcatcccttcttcctctctggtctcatgtttgagttgctgcctcttctcctctcctcttattcctcgagtgggaggcacttgtcagcctccgactgtcctccctttctctgacttgaaagcctcggctgctcacaggccagtgacttccagactttggtctcccagatgtttttgagctcttagtgggtgacaggacctatgtcagcctctgggacagaggtgggtggtctcccagccacacgacggggaggtcacaggcctggagctgcccgtagggtcctgaatgtcaggcaagggaaactgggaggaggcattcccagcaaagcagcaaaaacgtgaggagtgtctggggtggcgacaaggtggcaggtgtgggatgggaaactccaggtgtgggcgggccaggctgaggctttgccctgtagaagctgttgcagggaggggctccatgccaggggggtggcatggtccatgaccacagccacgctttgccatgtgtgttgcaagaaaagacctgagtgtgatgagggagagaagttgaagttgggaggaaagtgggcttttctgatcagatgatgctctgattcagacattacatgccccctgctctgaacacagcaataagataaaaaaaatacacttagaaaataaaaggacctagacaagtaaaaacaaaatctctgaggaatagaaatggaacagaacatacagtggtgagagacagcagagacccaggcaccaggacatggcttgagataggcagatgggcttgggagtctgagttccatggcagcagaagtgtgcaggtgtggctcagccccctctgagcactgggggaggtacctgggccctttggaggaggctgaggaggggtgaaggcttgttgagctgcagagaccaggaaggctgcagggcagggctgactggtggctaggtctgtaattcccacaggtgaatctggaccagggtcctgagatcccagggtgggagcccctgcttctgaatggggttgggagtggggcagggagggcatgtgaggaggaagaaagcagcttcagctgtgctcatggtggagctgcaaactgagggctgggaacagccagcatcccagacagtgccaacagcatctacagtcagaaggcgtaatcactccc

SEQ ID NO: 117 - DNA, 1368 bp, Homo sapiens
  misc_feature 1330,1334: n=a,c,g, or t
gctttgtggatattcatggcctgctgctaaactctctattctgttccattggtctattttttcctgtaccatgtttaacactatagttttacattatgtttccttgtttatttatttaacaaacacttatatagcgtgttttatatgcctggttttattctacatgctgcaaaatataaacatatttatcctcataataacctagcaggagtaggtattattttattttatagttgtggaaactgagacccagagttgttatgtaactggtctaaggctgtatatgcaatgttaccattcatagagtatgacttctcattcttttatttttttttgaaatgtcttaactacttgtggtttttattataccttaaaaatattagagccatttcagaaatttctttagaaaattctactggaaatttggttggaataaaattgcatttacaggaagaattttcattgtgataatgttaaatcagaccatccatgaatatggtataccaattacacctctccattaattcaggtcttctcttatatcctgtaataaggttactaaattttcataataaatatattttttggcaggttaaatctgggattggcaaatttctgtggcctgcagcctcttttggtacggcctgtgagttaagaacaaattttactatttttaagaagttatagccgggcacggtggctcatgcctgtaatcccagcactctgggaggccaaggcgggcagatcacctgaggtcaggtgttcaagaccagcctggccaacatggtgaaaccctgtctctactaaaaatacaaaaattagccaggtatggtggcacatgcctgtaatcccagctactaggaaggctgaggcaggagaatcacttcaacatgagaggcggaggttgcagtgatcggagatcacaccattgcactccagcctgagtgatgggcaaaagtccatctcaaaaaaaaaaaaaaataagaaatcagctacaaaaatgagatgctaaatacactagaaaaatagctataaatacctaagatattactagaggtcagcaaactttctgtaaaaggccagatctgtctcaaaaaaaaaaaaacacaaagtgctgagattacaggcatgagtcaccaagcccagtttgtctaaatttaaatggccacatgtggctgggacttctgtattggacactgaagttacactgtcagtaatcagctacaataatcagctacaggcacctgtaatcccagctactcgggaggctgtggcaggagaatcacttcaacctgggaggcggaggttgcagtgatcggagatcacaccnttgnactccagcctgagtgatgggcaaaagtccatctc

SEQ ID NO: 118 - DNA, 1493 bp, Homo sapiens
ggaggacagaggcagagtcggggagcctccttggaactcagcagttggttattttgtgatacagtcatggtgggtaaatctgttaccaaccaagtatcttctgaatgtcaaatcctgtttaatttcactttcgctttgctgatctgtggcctgcctcatactgagtgtcaaagagacactgagtgtcaaagaaggaagtaaacgtctttggccagatttaatttctgactctgttgggaagcgaagtaacatgatgggtgcaagatacacagaatggaacatcaggggcttggattcacattcctcatctgtgaagccagggcgttgcctgagtggtccttagggtcctttctggctctaacattctgcacttttaggattttaattcctgattgacatttggctaagcagaagacaccggatgagagaacacctattacagaccatctctctctctctagggacgactggagtgagcactggcctgggagtctgaagattgtgccttcagacctacttcgtcacttactagctggcgactttggtcagtcatctagtttttccgggccttatgttccttacatgtgactactaaaaggctagtagattataggatttattaaagatccttctgactcttaatttccagtggtcagattaaaaatagtttgctaataatggctatgttaaagagctctgaccttggagtcaatttatggctccacatccaagctctaccattcactagttttgcttttcacccaacccctctgtgcctcggtttccttttctgttaaatggggatatctgttctgtttgcctctgagggttttgtgaacattaaatgtgtgtgggaggactttttaaacttaaagtgctatatacattttaagaggtgttagttactgctccgttgttggtcagctgagataaatcttcagtgttccctggatcctggctctggagtgaagaaggtagcttggcagttgactttgagtcctcccgtttcgctgggcattggcagttctgggagcagagcagccttggcatgccatggggtggattgtgtgtttatagaaaagtctgggacgtaagcgaggaaatgggccacagctcagcggaagggaggccggtggtgaggatggaatggtggagaggcaggctcaggtgtggcccaccaggagctgccttccccacttttttgggaggtagggtggggaagaagaaaagagcaaattgtttaaaaatacacatgtatatagaaaatagtaaaactgtaaggttatctgtgtgttgttggattctgggaaattcacattttctctattctctgtattttccaaattttctataacgaatatgtatttcttagaataaaaatttttttcttcaaaatttggaggaaatcgctttttacaaatgtgggttcatctttttctgcttaaccttttttctcatttgattaaagaactaataaaaatgtttttgaaact

SEQ ID NO: 119 - DNA, 1753 bp, Homo sapiens
  misc_feature 1717: n=a,c,g, or t
gttatttcagatgacttccaaaagctgccactgcaaacatttacattattttgcaactctttgttatttccagatgtgaccaacagttacattcaaagcttaggttaaaattatattcatttaaacaacgattcatgatatgttagccgtgtctttgaaggtggtaaagcctttgatgtgtgcgttaaataattgtcattttcctgaaatatttcattgaacatggattgttaaatgctgtctgcaaaacaaaataggagatggatcattacccccactaaagacttacagaaaagaatccttaaatacagttaacgtagaattcagttgctcaccaaagtccagtggtgtacatgagtatcttatctgaatattgtgcttcctcttagtgaatatcagggcttcaattctgaattgtacataatgccctcaggtccacagtaagtggtatccatatcttacacctaatcagtttcataaatggcggtgttctgatgggcagttgtgaagaacacaggcccttttcttagcataccctgaatagctgtttgcctgagaatcagcatttaggctttgcaatttacagcttcctagtgacatttctgtccagagatgctgtgtgtatttaacataaattacctttaagttgtggctgcttagaagaacaactaaatttgttcctcattgtttcttattccctaagcagagaaaaaaataaaaagaaatagagtagcttgtatgcattttttaacactcttatggtagaaaattgggaaatttagaaacaaaataactttgggttctatttaatagttttggattttctctgtttaacttaaatatgataaccagttgtgtgtgtgtgtgtgtgtgtgtatgtgtgtatgtgtgtgtttgagacacagtctctgttgcccgggctggaatgcaatagcacaatcatagctcattgcagctttgaactcctgggctcaagcagctgtcttgtcttaacctctcaagtagctgggactacaggcacacgcccaactaattttttttttttttttaatttttacctgtagagatggggggtttcactgtgctgcccagcctagtctcaaatcccaggcctcaagtcatcctcccaccttagctttccaaagtgctgtgattacagatacgagtcctcgggttgcgcaggtttacagactagatagatagttactattggtcattcacacatttgtttagagttgatagatttaggtcatttcgccgtaggcggtggaggagatctttgattgtaaaattttaggttgctattctagaacaaaatttaattcactgaaatagttacctggaaaataatttcaagtatgttgcatatgtttcactcatttgtaaagcttaaaaatgttacatcatgtgttttcttatcattgtcttatgcctactatttactttgcaggtaaaatatacccaggaccataaacagatgaaaggtagaccaagtctgattttagatacacctgctatgagacatgttaaagaagcacaaaatcatatttcaatggtagggtccaaccagatcattcttaaaacatgctaaggaatgggcggatccagtgcacggatggcattacttcactattaatccgataactaacaaagcatggaaatgtggttggcttgtcttttgagggaggggcatttctaatcacactgaaatgcagtngaaacatttagtctaataaaatgatttttctcagcg

SEQ ID NO: 120 - DNA, 1340 bp, Homo sapiens
  misc_feature 1306: n=a,c,g, or t
cacgttcaccatctgccacaagacagaggttgtgaaaaacacgctgaatcctgtgtggcagcccttcagcatccctgtgcgggctctgtgcaatggagactatgacagaacggtgaagattgatgtgtacgactgggaccgggatggaagccacgatttcattggtgagttcaccaccagctaccgggagctgagcaaggcccagaaccagttcacagtatatgaggttcttaaccctcggaagaaatgtaagaagaagaaatatgtcaactcaggaactgtgacgctgctctccttctctgtggactctgaattcacttttgttgattacatcaagggagggacacagctgaacttcacagtagccattgacttcacggcttccaatgggaatcctctgcagcctacctccctgcactacatgagtccctaccagctcagcgcctatgccatggccctcaaggcagtgggagagatcatccaggactatgacagtgataagctcttcccagcttatggctttggggccaagctgcccccagagggacggatctcccaccagttccccctgaacaacaatgatgaggaccccaactgtgcgggcatcgaggatgtgctggagagctatttccagagcctgcgcacagtgcagctctatgggcccacctactttgctcctgtcatcaaccaagtggccagggctgcagccaagatctctgatggctcccagtactatgttctgctcatcatcactgatggggtcatctctgacatgacgcagaccaaggaggccatcgtcagcgcctcctcattgcccatgtctatcattatcgtcggtgtaggaccagccatgtttgaggcaatggaagagttggacggtgatgatgtgcgcgtgtcctctaggggacgctacgcagagcgggacatcgttcagttcgtcccattccgagactatgttgaccggtcggggaaccaggtgttgagcatggcccgactggccaaggatgtgctggccgagatcccggagcagctgctgtcctatatgcgcaccagagacatccagcctcggcccccaccccctgccaaccccagcccgatcccagctccagagcagccctgaggattccacatatccaatgcctcacagtctgcaagcctgctcacccactgcttctgctttaagccagaggcacctggaaccctggacttcactgggagggccaacttggaggatcagtgctggctgacaagccctccgcctccttgcctgcagagggcctggcactatcaccacctctctgccttnatgccaataataaagctgatctttattccaccac

SEQ ID NO: 121 - DNA, 2077 bp, Homo sapiens
cttttcacttgtaaacatataattaaatttgaggctcaggtgatccacccacctcagcctcccaaagtgctgggattataggcgtgagccactgcacccagccacatttattttttgagactgtcgcccaggctggagtggcggaatcactcttcactgcagcctcgacctccagggctcaagtcaatcctcctacctcaactttccaagtagttggggctacaggtgtgcaccaccacatctggctaatctggatcttgctgtgttgtccaggctggtcttgaactcctgggctcagtgatcctccagcctcagcctcctaaagtgctgggattacaggcatataggcatgagccacggtgaagccaacccttgatctctttcttgcagataggaactgccatttgttttagtttcctggagcctactgtaacaagttcatataaactaagcagaaaattactcttggcgctggaggcacttaagaatcctaccttgcctcttcctgtcttctggtggttgtcagtaatccttagtgttccttggcttgtagctgcattactccaatctgttgctgtcatctcatggtcctcttcgtgtctctctcatgatttgtcattggatctagagcccaccctaatcaaatataacgtcattttacctaattatttccgtaacgaccttatttccaaatagggccacattctgatgttctagttggacaaaatgaggggcagggctcagtattcagttcctccttcactctccaaatcactttggttcatgagttcagatggcatgggtgctagtgctggtgttgatgtgatgctaccaatgtaagcattagtttctttttataataacttgggcagtcagttctgggcactgacaaaattgagtttgtgatcttggaatactttgattatggggatacagtgatttgcctaaataattgtgacccttagagattctgaggaactgacagcccaataccttaatcaaagcctgtaactcataagaccctggtttactgcatcagcttggagtggcaggccccttgttctcctaaatgcaagaatcagaaggcacttagtgacaactacatatgctgagcaatgggggaaaaaaaagatactgcctgctttcaaagggttgtctgtaatactaaattctgtgttcatgattcagtcatacccctgaacaaagttacttttttctttttttgagacggggtctcactgtcgcccaagttagagtgtggttgcgtgatcttggcttgctgcaacctccacctcctaggttcaagctattctgctgcagcctccaagtagctgggattacaggcacctgccaccatgctcagcaacttttcttgtatttttagtagagacagggtttcaccatgttggccaggctggttttgaactcctgccctcaatgtcatctgcccacttgggcctcccaaagtgctgggattacaggcgtgagccacttgcgaccggcccaaagttacccttctgtcgaacggtttatatctggaaaggtgggtgaggaaagggtgacctaggggattgcaaaatagattattgcagatcctacctttgtgagctttttgaatgaggctataaaggaatttaaaaatcagattcaacactaattccgaaacccctcacttcattcagggtgtgggccgaagatatgctcatgtggtgttgaggaaagcagacattgacctcaccaagagggcgggagaactcactgaggatgaggtggaacgtgtgatcaccattatgcagaatccacgccagtacaagatcccagactggttcttgaacagacagaaggatgtaaaggatggaaaatacagccaggtcctagccaatggtctggacaacaagctccgtgaagacctggagcgactgaagaagattcgggcccatagagggctgcgtcacttctggggccttcgtgtccgaggccagcacaccaagaccactggccgccgtggccgcaccgtgggtgtgtccaagaagaaataagtctgtaggccttgtctgttaataaatagtttatatac

SEQ ID NO: 122 - DNA, 1830 bp, Homo sapiens
  misc_feature 1178: n=a,c,g, or t
gatgaaaataaccagaatgaaaatagctagaaaactcagcaagcaggaagctccctttctcacccttttgttcccttgccgatagaatcagtcactattagaaaaaatgaaagacgctctgtttaaaacaatgatgacagcagtacttaatatgtatttcgaggtgaacttatatagattgagagaggctgcatttggcagactgatgtataggaagacccatttgtttctagcttctccctgcagggaaaatgctttcgtcattatagcctctttacacagactggccattctagtgaaacaggtggtaaacctttgggctgcccagaaacattttatctgttttcacttacctaggaaggggaaagattagcgggtcatccaaaatctgtatgtaagctatcttcattttcttccccaaccttctcctcctgggaaacacaaatgctatctcatctgacaaaaggttttagaggataaagctgaaaagattggattgggatctttttgtggcttggggcggagccttttgctaaaatctcaagaatgctgctttgagtttagctagggtggctctcagaactggggtgcctggcattctcagcatttctcaggggcctcccacctctgacaactgcagtgttagctaatacataccttgagcatagaactgaatgctgtaattcagagccattttttttttcaacttgaacattgtacaattttactgcaatttcctttgaactttcttgccactgtttggaatcttaaaaattcattagccttctcctttctgacataaagctactcttcatcagagatgagttcctatgtatgtcctttgttccttcaatagctaattaatgtgcttgaggatacttcagtggaaaaaaagggttaaatatgcaaattactaataaatgtgtaaccttatgtaacttgtgttacatcaagtaaccaagctaatctagtttgtttcactggactaaggcttgtgctccctacttcagtattttgatgctttccttgatctttgtttcacaaaatgttgtgaattttggtatcattcaaaacaaatgacatttattaggtttcattttgaaacgatgtacagacaagtccccaacttagaaaccggtttgttcttaaggttcttgcgtcagcccatagaagcccantgacctccaccacagcccaaatggagggctgtgatagccagatctggttggcttttgtgggctgacccagacatttaatcaccatctcttatgttgttgccgtaagaaatgcattccaggttgggacttgggatcctgagagcacattcgccccctgtggtggccgcttgccaccttgcaagatggaagcccagtctccttactaccaaactgtagttgtaagcagagggaggggtgagatgtttataggacattccctaagctggggagtgatttttatcactattcatgtcaactgtactttggtatagactccctatcaatttaataatatgaaaagcctaaaataaaactatgcatgctattctatgtgctattttatatcagtaaataagcttatgcttgccagttgtatacacagttatgaggtgtatagaactgactttgacagtattttttgcactgtttcctatctgtttttataaagtcttatttagatattggaccttgttgatgttctcactgcccttgtgcttgctataaaatgtttcatatgtgcctttacaaatgtgagatctttattctaacctttttttgtaaaagatatctattgatttccatatgcaataaacctttttttcagagaaaagct

SEQ ID NO: 123 - DNA, 1962 bp, Homo sapiens
ggaaaaagaaaattatgagagttacttaaaggtaacatcacatactaaatgtcttctataatcctatatttattaatgcattacaactctgtagattgttagttactaggccagtagctaggaattggtataaatttaatgcaccttctatcctgaataactagcatggaaaagtgaatatatgtgtgagcagatatggctataaagacctatagcttttgcactttatgcatatataatcaatcctttctagttcagtgaattgaccccatccacaggctgattcatctttgtgttaaggggcaaatgaaacggtatattatttctttgcagtctcctctcagtcattcatcaatgtggccagcttatctactcccaattatgttgttgatacatctccaagccatctgtcatcagatcaaaaagcagcaaacagagggtcagtcacaggatgttctgacacaccattgtaactttttgttagagatgatcccatttagaaaaagactggtagaaattggagtgaaaggaaccctacagattagcccagttctctcttattttcagctttacagacaagaacaatttaaatctaaagaatttagtagattccttcagtgtcacaaagctgtttcatgaaagaatcaagattataacctggatattctgactcctggcccagtgctttttcttactttgtagctacactttgaagtaagattcaaactgttatccactcaattgccttattcctgaggatgtagtgaaggaagaaaaagttttctggaattccgtaaactatattttaagcttatttcttcaaaattattttcatatatcacagatatatcattggaagatataatttgcatatatgttcattatcagtgttcctaatttggtattacatgtattctatttttttctgaatgatagcatgaaaagtgtcaaagtggtttgtccgctagcgtctgtctgcagaactttcaggatgactattaattcctctcagatgtcatttttgagtggtccaagcctgctgttttgaacccacagcagtggagatttgtattcttatttacagttgtgtactataaagtgtgtgttacataggttttgtgtaataattatttgtaaatattatttagatttgtatttagacatgatttatatctaatatagatacaaagtctgtgtctaaatattatttaaagaagtgatttttcattctcttggattctttccagtgtggtgccttttatatgcctcacatagtctccttgttctcctactaatattcccaagctccatatgccaattaaagaagaaacaaaaataaaagtttgtcttgcttgtgaaacattaagaagaggctgtcaggtttaataaactttttaatgaatatttcagacataacaaaaaactgcagagcttcgtacacttgatttaaataattcttgagggattttataaggtcatcttatagacaaaattatgagacaccagtgtggttatcaatgctttcagaatacttgtgtttatgtaaatataccccagagtccaaaactctgatatattcatatatattcacaatgagaggatgtctgtgccaaatctgtcaatcagtacaatagaaaagttaattatataactacaacacgaaacacaaatttttagaagcaaattatgtcctgtaatttacccccctccccgctgctcctctgctaactcattttcctcttttcccactctaaatgtaaggcaacccttggctttggagaagcatctgttccaatattctggtgctatgtgctcagttgtactatatgcaaatgttactagacacagaggagatcaaagtgttgatacacttattgctaccatttacagaatgatcaatttgatagctatcatacatggctagcaagacactgatttttctaataaaaaaatttttaatgc

SEQ ID NO: 124 - DNA, 1506 bp, Homo sapiens
  misc_feature 1471: n=a,c,g, or t
ggtctgtatagtgattggtgctcgaaagctcggggtcaacccagacaacattgccacgcccattgcagccagcctgggagacctcatcacactgtccattctggctttggttagcagcttcttctacagacacaaagatagtcggtatctgacgccgctggtctgcctcagctttgcggctctgaccccagtgtgggtcctcattgccaagcagagcccacccatcgtgaagatcctgaagtttggctggttcccaatcatcctggccatggtcatcagcagtttcggaggactcatcttgagcaaaaccgtttctaaacagcagtacaaaggcatggcgatatttacccccgtcatatgtggtgttggtggcaatctggtggccattcagaccagccgaatctcaacctacctgcacatgtggagtgcacctggcgtcctgcccctccagatgaagaaattctggcccaacccgtgttctactttctgcacgtcagaaatcaattccatgtcagctcgagtcctgctcttgctggtggtcccaggccatctgattttcttctacatcatctacctggtggagggtcagtcagtcataaacagccagacctttgtggtgctctacctgctggcaggcctgatccaggtgacaatcctgctgtacctcgcagaagtgatggttcggctgacttggcaccaggcctggatcctgacaacactgcatcccctaccttacagggctgggggaccggctcggtactggcctcctggcactctgctttttcactgactggctactgaagagcaaggcagagctgggtggcatctcagaactggcatctggacctccctaactgggccccgctggtcccatttgctcattagaatttcctctcacatcagtgggatacagaattcagtttctcccttgccaggtccttgggatggttgacccctgcctctgcagtagccttttgtgagtctgctaaggtagctctcacacacctcggctctggggttgatacctgagcctgcaatagagccctgaaatcaagagcatggcttgagtgtgtgaatatgatgtgtgcacatgcttaatgagcgtgcaagtgtgcacacgtttgtggagaggagggtgttctggcctgagaaggtaaagaagaggcatgtccagtatgctttgcagggtgtgtttgctcttttccatgcccatgcaacccagattggggtggagcaggaaggagctcttttctgttcccaagcctcagaactcttgagctgtggcttacttgctgtcttcaccaggttcaagctccgtgggccacactgctgctgtgccaagaaggtgtacagcctccccaggatggggcctcatacaacccttcatctgcactcaacatttaattgtgtccttgctgtctttttattttcctttttgtttgttagcaaaaacctctatttagatttcaanaatcagagaagtgtaaaataaaacagattatattg

SEQ ID NO: 125 - DNA, 2194 bp, Homo sapiens
gaccatcctggctaacacgttgaaaccccgtctttactaaaaatacaaaaaattggctggacgtggtggcgggtgcctgtggtcccggctggtcgggaggctgaggcaggagaatggcatgaacccgggaggcagaggttgcagtgggccgagatcgtgccgctgcgctccagcctgggtgacagagcaagactccatctcaaaaaaaaaaaaaacaaacaaacaaaaaaaaaaaacattctgttaaaataaaggtcatcaaaagatcttttcctaaacctttcctttaccagaaatagctctagtgtcacatggtcctttctcccttcttgctttggtaggaatccaaagctaatctgtccctgatctggattgcacgcacctgtgccttttggggcccttctgcattagttcttccttctcttctaacctcaaaaatgtgttttttctattggctctttccctttaacatagaagtatactcacgcttttgttgaatcttgaaataaaagtcttcctttaccacatatctccctttaatactacatctctcttctcagccaaatacttgggaagagaagccctgagtttgtgtcattgttttctcacctccagttcactactttgtctactgcctgacatccagctcgctcacacacacacacaagcccaatcactaagttgccatagctaatttgtagctttcctgccttcctggcaaaatttgactctgcattgggataatacatgtcgagtacctattgaacaggcactgtgctaggtgctactgttatagatatgaaaagaaggcatcatctcctttctaacaactcacaggagcagccattcctgattcatacatgtctcttgactcccagtgctcactttttcaagcttcacttaatgccgtgcaaatcaccctattctccaggtcttctttcttcccagttctccttactatacacaacttctcaaggcagtcacctccacactcatggcttcaattgctttctccattctctgagaacaatagaattttaaatggttttatttcatgtattagctttattttatacaaggtgcctcacctgctgtaaccatagattcaaagttgctccatgaaagtaataaatgaaaaatggtgattttttagcatgtaaattttaggaaatttccccagttacgcttaatggcttgatttagtgtgtatgttatttttgaaaacatatgttgggatgtcacaaatggacttagcctacagagatttatattcaacttttgaccagagagttccattttaatgtgacactgagagtaaaaaactatcttttcctccttacctatttctcttcctacattctcggccaggaggaaggcactgctacatacccagtcttccccagcagagcctgagcagctctgttttccttctacttcccctcttctttcacatctcatgaccaagcacttcctattctgtctcccaaatgatcacagattttttcctccacttttgtcactgccactgcccttagcattactctgcctttagagaaagtctcttaattggtttggttgcttccttcagtctttattatacagaccactacacgcacatctgacagagacttttcacctttttatggttgaatgactgaaattcccagaataaaattaaaaccaccccagcatcaaatttgaggtcaaatagaggtgggtttgtatcccaggttcatatactgtccagcagtatggtctcagaaaactgacctccttaagcctttgtttgtgtatctgcctacactcattgagagttgggactatttcacacatacagtgcctggcatgtagaagggacttaatgttgaaagaaggggaggcattttaaaatccacatcaaaaaaatgttgttctgttcgggagtggtggctcacgcctgcaatcccggcactttggggggccggggcgggtggatcacctgaggtcaggagttcgggatcaacctgagcaacgtggtgaaaccccatctctgctaaaagtgcaaacattggctgagcgtgggggcgggatcctgtaatcccagctacttgggaggcttaggcacttgaatgagaatcacttggacccaggaggtggaggttgcagtgagcaatgattgtgccactacctgggcaacagagtgagactctgtctc

SEQ ID NO: 126 - DNA, 1561 bp, Homo sapiens
gaagaaaatatactctgagtatacctaatggtttattctcttttattgttgaatccactatttacatttctttctttcttttatgtattagactggactaggaaaggtttacagatctaaataaggaatgaggagtgttattatcattgtattgccatgaccacaaactgcggggcctctcgcccttgccctcccccctgtggttttgagggtaggaagccttaccataacccagttcctgatcatgccgcctccctgccgcttacctggtcaggcctcttcgctgtccctacctaccccaggcctctgtgtttgctgctccgtctgcccaaagctctttcccttggtagcccttggctatgtccctcacttccttcaggtgtctgctgtcttctcagcgcggtgtttcatgaatatccacaatagtgcaccctgccactccattgccttacctgtatttccctgcatggcactttgcacggcctgatactatatttccctcggtttgtcagttggctgcctgcccctgaatgcaggctcccaagagggcagtggctttgtgtcctttgctgctaggcccatgttgttgtgaacagtgcctggcacttaatagacacagactaaatacttgatgaattaatgggaggatgaattcaccagattccctcttgtgggtgactctacacaagatggcatttactcgccaggtgtccggctcccttcaaaagacagagaatgatggctggtttcgttgtagcttgactcagtggcacaccctgtgcctgacacccagttgacagatgtgtagggaacaaaattatgacgggatggccacacagttggctgtttgtactcattgctgccagctgtctcccagaacagtcatctgctctgtagggggagaaacagggacatgaaaagccctggaaggttgtcaggaagcaattttaaatttctaatatgtaaacatcggggctttggcatattttgaaccattttgatgataggaatggaggtggtaggagccaccctgattaagttcttgttgagaataaactggtgcaccagacatttacataggctgaatcaatgttgatggcagccgtgtttttaatccatgggcctaaaacagtgtccctcatacctgtctcttgctgaggcccctgtcgcaggtgagccatgtctgacttccgagccttccatcgactgctcagtccacgtcttcagccctatttcccaagcttacctagtgagtcctccttgactcaggctggttcctccattgtttctgccacctgcaggccattggtgctccttgaataccctgtggtgtcatcgctgactcgtgcctccagggctttcccgctctgacggctctgtgtttcctattgcttcatatagcttgcttctgaattagcatgcgatatgtgacactcatatgttatgtatcttggtttagtttttacagaaagatgaaagactcttaaaagggatcttggagttgttcttgtacatcttttatatctcctaagcctttgatgggcacttgttccaaatgggt

SEQ ID NO: 127 - DNA, 1651 bp, Homo sapiens
ttagaacatcaagcacagaagcagctgtatgatttacctgtttttttgaaactttaatgtttaccttcccctatgtttaatttttctgtggtgaacacttttgttagaacatggcttttttatttttcttggaaaaatatgctattagtatttacaaaataattaattacctgaataagcagtatatactaaaagtcttcaaacattactttattgattacttatgttttgtggtgcgctttcaacatccctaagagttaaatgtcttagtcatctaatacatggaacagggtcaaacttcaatgaaattaatacttattgcacaatcataatatagcaacctaattttcttttatttataggcatatctttaaagctttcttctcttttttgaacaaatgaagagaatccagttagtttttgcctttcagaggtgatttgccacgtgcacaaagggtctgtaggtgaaaagacaggcttttgggtttcttgaaacatcaaaaactgaatttagagaatggttatctaacactcaagtcaatgttttttttgaaattactagctattggtataatatacatatatgtacatgtatacatatacatacacacatatgtacatttacacatatgtaagtatacactcatatacatatatacacatgtatatatacttgtgtacacatacatttttgcctatagctagcaattatttcattcagatacacacacacacacacacacacacaggctacttaaaatagagagtgacttgagatatacaaaaacaggaagaaaagccctggaggtcatatagctaatgtataactgcacagcaagcagctatgtctaaagctaacaataaaaagaaaatgtgggagttgtgcaattagttttattctcattttttggaagaatatgttcctggtttctctaactaaaaggaaaaaattcaaaggaaagttgtaaatattaggaagtaactgaaaaataagaagcaagataaagtggggaggctatgagatcatataatgagctaataaacttttcaacaggggacacctgttctcccttctaactgaagacactaaagagaagctaagatcctatctttcaatcatttagtaattcataaaatcccattatttcataactcaaagtttacctttgaggttgtatgtttacctcatttgaactcgaaatagaagaggtttaagtatttgaataagttgggaaaaaaaggaaaaatagtcttccctgcccttgtcactgatggtgacactacttgtaattactgtattttttggcagaacactcagatgaacagattcctatgctgtggacttttatcattctttttgatggctgatagtagaaagcacacagtaggtactccataaatgtaagactatggcagctgtctagtacaagtgcttctcactgattcttggttaccaggaaaaccagaaagcccgtcacttgccttgcctgcaaaggcgagcctaaagaaatttctctaaccaaaattggcaggttctttccaccacaaaaggctcttggaaatataacttatggggcttaaggctaatttgagttgaagggtatttgtaatatttgatttgcttttagcagagaaaacaataaaagaatcc

SEQ ID NO: 128 - DNA, 1801 bp, Homo sapiens
aagctacctctggaaactgagttcgaagtttccaaaccttatcccagaccccatagccatgagttataataggcacataattaataatcacgtaattataatgtctatattatttataatttgtatatttatatataatttatttaactgcatctataatctataatttaaaattacatcaggtaagtaattacttacctactatagtgcttctgccacttacaagctgtgtgactttggataagtgccctaacctctctgtgcctctgctgcctcctctatgagttaaaatgtgtagactgcttctcagaacagggcccaacacatgtctggtaggtgtgggaattagccccgaggatgctgatgacaaagcatttctgtatctgttttgctcatgggttctttgctcaaccctgcaaggtgggcatttaatcactatccctattttatgggtgaggaagcggaagcccagcaagttggggtgactcacctgaggtcacacagcgagtcagcagtgggcgtcaggtactcggtgttctttccaaagactcctgaggccctggtctggaaaaagccagctctggaccaggccggaacacaggggcctttctgaaccttcctttcaggggcctggggccgcaggggcctccggcccgtcagccaagtcttttcctcccaacatgccagccagggaacacagacagccggaccccgctctggccactgccccgccaggcccctgtgccaggacagcgtgtccgcccacccgggcagtgaccagctgttcctgaggctgtgggctggagccaggtttctgtcacttcaaggagctcctgtcttcccggccgcacctccacagccagcaaggaccagtcagggattttcctgaactttccctctgttataaaagagtatataaacatttaccttttaaaagtaacagctaacttagttgcgccctcctctgcccagcattggtctggcagctgcatgtacgttgtctcctggcatctgcgcaccatcgtctgaggtgcataatcttgtgcctgtttgcagatgaggaaactgaggcacagggaacttgagttgcctgcccaagcccccacagcaaggcagtgtctgggtggggatttggacctagacagggagcctccctaccaatcaggccttcagggcagagtcttggggcccagaaaagcccagcccagcttctggttttaaattttataacgtgttcctttgttcagatgattgaaggaaagcatattgcaggtagaaatagaatgaaaaccttgtaacacatgaaaccaggagtgcctttgtgtgcaggtgacccttgaccaatgtgggggttaggggcgctgacccccacacagctgaaaattcatgtgtaatttttttttttttttttttttgagacagggtcttgctctattgcctgagttggagtgcagtggcacaatctctgttcactgcagcctcgacctcccaggctcaggtgatcctcccagctcagcctcccaagtagctgagactacaggcatgcatcaccatgcccagctaatttttgtatttttagtagaaatggggtctcatcatgtcacccaggctagtcacaaactcctgggctcatgcagtctgcccgcctccacctcccaaagtgctggaattataggtgtgagccaccatgcctggcctcatgtgtaactttcgactccccagtcaattaacacacattttgtaaacacacattttgcatgttatatgtattatttactgtagtcttacaatacagtaaact

SEQ ID NO: 129 - DNA, 1510 bp, Homo sapiens
gccgctttttaaggttcgaaaaaacaaaaaaatagatggcaaatctcagtggaatacagctttaaagtacagactatgatgaaagggaagttatgtagtttaaagtacatttaattttttaaaaacataaatacgtttaacagttacttcttctaacattaacagaggcctatactcagggaaattctgttttttactccctcctctcatacatatgtggatacctgcataaacatacatacatatcacacatgtatagatgggtgtagaaaatttcacaaatacagcttgattagctttcacaaagtgaaaacagcaaagtaatcagcaccctgtgtgtgtgtgttttattgccttattaatgcatgaatatggttgtattttcagtggtcctcttgttacagttacccatctacttctatccccaataatagcaaaactgtttttgattttcattcctgaattgcattgagaggttatcatcattgtgtactacttagtgataagcataactggcatgttattcttttgctaagatgtaataatttcttttttttaccatctgtattcaggctgttattcacttacttttcattttcttagtcattgtcacttgaattgttttgcttctctattttattaacttgtgtagcttctggaattctccctcatttcccctgagatctttggtgctaaactcaaaatagcagtttgaacgctggcaccaattagaattctaagtaattttttctcaccaataactctgtactatatccctgtatacccaggttattattataatttcttttgcatccaaatctcactgtaatctttttcttgtatacagatggtatgtattctgatcttattttttttccagattgcttttccttagagttttcatttatttgactttatgtttgcagtatctgatgactgtttattgaactttgagcctgccttgtggtgggacagtttgcttttatacttacatcatatgactctggtttacaaattaattttcctagtaagcaaaagaaactacatcttaggtgaacttgttttttcttttttagtataaataatctggcatactgttatttaaaatttcttgaactagatatccaaactacaagcaaatgaaatatttctgggtcagcattatgtttcaggaaactatgactgggcttcgtaatgtattagattaggaggctgtaacttagtccttgtctttgactgtgtaacattactcgagtcattagtcaaattgttggattttttttcagatagtttcctcatttgtacacaagaaaagccagatactttacatctctgggttgttgtagggatcatctgcgagtatgtgaatagtactttgaaaatataaagtggccgggtgcggtggctcatgcttgtaatcccagcactttgggaggcctagatgggaggatgacttgagatcaggagttcaaggccagcctgacaaacatgatgaaacctcgtctctccc

SEQ ID NO: 130 - DNA, 1496 bp, Homo sapiens
gggcagatgggcccagttcaaagggtctgagaacacaacggtactgcaggatgagctttggaactgctgcaccgtctcttccactgcattctgcatacgggccctaaacaagtcccaagccttcccagattcaagacatgggggatgggctgtatctcttatggagagagtcacatagcaagggtgtggctctagggaggaatgaagagtggtcaagtgcagcctgccatgctggctccttcaccagcctgtcagttatatgagccaatgggctgaatcatagtcatctttctctccacatgcctggcccgtgaaggatttgcctgcccagcagagaccgtggaatgaatgtgtgctccaggcactctgccttctctctcttctttgacttctctaagctcgttcctgcccctgtcccactctgtctctcttccccaggatcatggcattagtcggatccttcccatcattttcattttagctccagtatcacctctttgagccttccctgactacccttccagcattctctaatcccatcaccttgttttttttatcttttctttttttttgagatggagtctcactgtgttgcccaggatgaagtgcaggggcacaatctcggctcactgcaacctgtgcctcctgggttcaggtgattctccggtttcagccacccgagtagttgtgattacaggcatgtgccaccatgcctggctaatttttgtatttttagtagagacagggtttcatcatgttggtctggctggtttcgaactcctgacctcaggcaatctgcccaactcagcctctcagcctcccaaagttatacaggttttttttttttttttttttaaatcttttcatagcatctgtaactgtttaaaatattagtttgacttccttttctagaatgtaagctttgggagagcggggtccttgcctgtcttgttctctgttacttctccagctcccagaatggtggctggcactcagggggtgctcaacacacataattgtcaagaacatgctacatcaaggcctgagtggctttgccacggctcttcttgtgactgcaggccttggtgccagcagccaccccagttccaagaaatggtctcttgctggccagcttagcaggaagaactggcagcgttcctgttacagcacttccaggtggctgcttttccctgagtccatgtggcttctccatgtctctctgttggagtcacaagttgtggaaattcacttaggccaacttagaccaagaagtggaatagttaatagttaaatgtcagtctgggcaacatagcaagacttcgtctttacaaaaaatttttaaaaatattagctggtgcggtcgtgtgcacctgtagtcctacctactcggggggctgtggtgggaggatcgcttgagctcaggagttggaagctgcagtgaactatgattgtgccactgcactccagcctggatgacagagcaggaccctttatct

SEQ ID NO: 131 - DNA, 753 bp, Homo sapiens
caaactagttgagggatacactgtttgcatacttacgtagattttaatatctgttcaaagattttcagttcctggtatacagattttaaaatctacgtaagtatacaaactagttgagggatacactgtttgcttttataaaataactttgattacatgaatataataaattatgtgcatataaatgtgtgtctatatgctttcctttaaatatgtttgaaaagatgtttgaaacttgattatactatttataattggcacagtactttgaattatgccagtactacattgtaaaacagagttgtattttttgatatttaacaatgcttaacactttaaatgccacttctgaggaatggacctggtgtaacacacttgaatatgtgtgatgccaaactttttaaaatacaatataaattatgcttatttattattttctttagtttaatcttggtcatgttttggtgtgtatttttaatttttttcttaaattaacactttggcatgaacattactgcaggtttttgatgaatataatgaatgtatggaattcaattgaatttgcatggtcttcggaattttttctgtgtgtataaatttggctgctattaaccgaagagagaactttctgtgagtagccatgtgtgttgatcagatacagtttttctgagatcttcaattaatctccctttaaaaatgaccaaaacatgtctttcttgaattaactttgaataaaagtttgtatattaaaag

SEQ ID NO: 132 - DNA, 565 bp, Homo sapiens
ggggtatatagagcagcacggtctgcgggatggaggcccttcctgctgacacaggaggctggggaaggtccgtggctggagaaggtccgtgccttgcccagaagtgtgtcttatcaccaagagatggcccggtgcactgagcacctactgtatgctagcactgcggtggccgtcctgctcagcggctcttggattagccatccttggctgcctgcaggggaggacgagtgttctcaccgttgtcctgctatggaggggaaggtgacaagcttctctggtggcacctgtgcctcaaagtgttgggaaagggtggttttcccaggtgggggcccctgccctgccccagcctcaccctgcctgaggccctgctcagccaccaccctcgatggccctggtagaaagtgtctcccgacacctccgcaccctgcctgtctcccagcctcagcagccctggaggtggcccaaggcccatgcccatgcccagtgctgggcacccccaggaagctcagaggcccccaggcagagccggggaggcgtgaaggcatagccagggcagaagcagaac

SEQ ID NO: 133 - DNA, 1761 bp, Homo sapiens
ttctgtgccatggttcccacattcgcactccatggcctcctgtcctggaccccacgtctgcaaggaaaccctaggaccatggatacctctgtgattcacgctgagcccaagtccccacactggaaaactgggaaatggccagctgtgtgtcccaggaaattcctccccttattcttccttgaagtgcccgagcatgtagggcaagaaggaaggctgaagcgctgtccctaggaggaatttctccttcagggaagcctcagttttgcccatttatctaattgaatcagttttttacccaatcccccgattttgtaggataatctcccttatctaaagtcaactgattatggactttaatcacatctacaaaacacttccatggcgacagctagatgagtgtttgaataactgggactgtagcccgtccaagttgacacataaaactgaccatcgggccgggggcggtggctcacgcctgtaatcccaacactttgggagcccgaggcgggcggatcacaaggtcaggagttcgagaccagcctggccaacacggtgaaaccccgactctactaaaaatacaaaaaattagccgggtgtggtggcacacacctgtagtcccagctactcgggaggctgaggcaggagaatcgtttgaacctgggaggcagaggttgcagtgagccaagatcacactattgcactccagcctgggcgacagggcaagactctgtctcaaaaaaataaaaaactgaccatctagtccttgtcatctgggcaccctcacacatctccttaaccacacttaatctccaaataagtacgataacatagtcatagtcccacccaacatgatgcagttatcttgcatacaactgaagacaactaaccctttccccaacagagcccaccagcagtggtggagatgtcggtccatgagcgcacacacaagactgagggactgtcggccctcccaggtggtgtcaacacaacatcacacacaggtgggggggcctgatagcccagcacccatgatacagggcctaccaatgcttaaaaccacacccagggagcccacagaggcactcagtgggtggtggggtgatggatacacatctatcaggcacagggcggaggtgggcaccactgagttgcactcagcaaacacattgggtatcttgtgcccaaggcctgtatttgtggagctgatgttctagtgagagacagtaaatgtgacaaaagtaaaatatatcagatggtgagaaaacagaaaaatgagatcagaagtggagatgttggggccaggcacagtggcccaggcctgtaatcccatcactttgggaggtgcaggcaggcggatggcttgagcccaggaattcaagaccagtccgagcaacatggcaaaagcccttatctgcaaaaaattcaagaattagccaggtgtggtggtgcgtgcccaggttcccaggtactcggaggctgagaggtgggaggatgccttgagcttgagaggttgaagctgcagtgagctgtgatcgcaccactgcactccagcttggttcatggagaccctgtttttttaaaaaaagaagtggaggtgtttacaccagcaaaatactcattttttaagtgtaattaagttgaagatcaaaaaatggaaatgtataattaaatcatacttagcaaatctaacacatgaaatgtaacatctgcatatggagaatcgtgttactttattgaaaaacattaaaagtttgagaactt

SEQ ID NO: 134 - DNA, 1502 bp, Homo sapiens
cctggaaattgaaacaaaggcagagccacctagaaccagtgccaaagcaaatccaaaacttggcatatgccaaaatatattacctctaaactctgtagtttccattctttcatacttcattagcatatctaggaagtaagatctacttgcagcactttgaaaaaaataaataaatgacatgtagtttttcttttccaagaccctaaaagtttgttcttgaagatcagttgtatttatgcatataacatactcatatatcattcagatttttatgttcagtcaacttgtgttagaatatgaaggagtaaacttctcatcaactccctggcttgccttctaccttaatgatattttaaacttactgacaaaggaaaatttaaagtgtggatattattagtttaatcaatactcattggattgtacagcgtaagccagacactgtactaggcatcagagatgcagtgatgagtgtaagtaatcacaagtatgcaaacaatagtgattaagcgtgatttttttttttaaagcatggtaaatacctcatggagatggtgttaatgtaaggtacagaaccctaattggcctaagagtttcagggaaggcttaccagagaaagcgactttagattcagataaagcataaataggagttaaatcaacatgggtgaaaaattgtgccaggcaaagggagcagctatcctaagatctgtaggtgaaggagaaatcactgtgctccagcctctaccgcattcttcctgcttttggacagaaaattaggaatgtgatgagacaagcttcttggggcccactgaattaattcccatacacttaccctattgaaaattctggataacaagatttatgccatagtttgattggcaatggcttacattttaactgttgacttctttgcatttaagagatgttaggcatgattttacatcagcacactagttaggaaacgaaaggaaaagggactagtaaaagagtccaaaagagaggggtatgagaaaaggagctttacctactccaagaggggtacagcttcaagttgataggattaatcaacattgtcacacatagttctggggagttcatagtgagataaagactatggacttggatgtattttaatgaagcaggttgtagtggggattcttttgttagtttgtctgatgggaatacaagctccagagacagtcctactctttccttctaatctgggctccatcttacatgtcatcttttttgtcccaaagtttttcacctgtaaaaagaactaatgttagtaccaagctcagcaggtgctgcaatgattacatgtgtaagtatatacaaagcagttagaatagtgtctggtgcatataaagtgctcaataaaattattatttaaagtcagataaatcttctgtcatattcaggacttctgacaggtttatgtccatcacgcaattatctttcaatagtacagatataattatatgattctccccatcacctgcc

SEQ ID NO: 135 - DNA, 1364 bp, Homo sapiens
ggcagatttgccttgtacttaaaagtatctctaaggaactcaaagctcctaggccccaaagactagacctctaatagtagtaccttggacttagtggcaggtactaagtgggagaaggtaccttggcacaaggaaatgagccagaaccaacaaatgaattcatctacttaaaaaattaagtctgtttgagacaacttttgatagtattaaaatgttaaatctaattgtatttcgggaagaaactttggaaagctatctgatttttgttctctcttttgtaactgtaccattttcatggttgcctatggtcatcaagttttacatgctgaaattcttggttttggatcactgcagaaacgtgaagagggctggtgggtggtgattggagatgccaagtccaatagcctcatctccatcaagaggctgaccttgcagcagaaggccaaggtgagtgtgtccactggccctagcatttgttctggcatgggggaagggtgagaatgcttcctgtgtccatgctcatcttgatttctgcctgctctttctaggtgaagttggactttgtggccccagccactggtgcccacaactacactctgtacttcatgagtgacgcttacatgggatgtgaccaggagtacaaattcagcgtggatgtgaaagaagctgagacagacagtgattcagattgagtcctgaggcatttacttttgggtaaaggagagttgagcctgaattaggaatgtgtacattgtaggaatcctggttgtggggaccaggtctgtgggcctcaggtctggccagccagggctggtgctgtccccgcctacctccacttcctttcccttgctcactctggatccagtgacagcaggtgtcatgggtcaagcataaatcatatatagcattttcaggcatgttcctggtagttcttttgagtctgacattctaataaaataatttgtagaaaccatttgtctttgtagtgattccaaattaaaagttttctttctccaacctgagggcacggccaaaaagatctggttattttttagccaggaacgtgcttgttaatgagtatgtctggaggacagacctgctcattaggtgtgctgtcccctgtagcctcgtgagtcagcccagaggagggtacatgcgactgtggcctggcctcagtggtacccacacatcagcactaccacaagaaccaacactgagcctcggaagctagatcacaggttaggggtttctctagatgggggttctgaaatttgcagtgtctgctcctgggaggcagcaccagaaagggcactgaaatgtactagctggatgtgacccagtcttaataaacaggttttctaatc

SEQ ID NO: 136 - DNA, 1854 bp, Homo sapiens
cgcagcccggtaccggctcctcctgggctccctctagcgccttccccccggcccgactccgctggtcagcgccaagtgacttacgcccccgaccctgagcccggaccgctaggcgaggaggatcagatctccgctcgagaatctgaaggtgccctggtcctggaggagttccgtcccagcccgcggtctcccgacccctcggtcccatgtccatgggggcaccgcggtccctcctcctggccctggctgctggcctggccgttgcccgtccgcccaacatcgtgctgatctttgccgacgacctcggctatggggacctgggctgctatgggcaccccagctctaccactcccaacctggaccagctggcggcgggagggctgcggttcacagacttctacgtgcctgtgtctctgtgcacaccctctagggccgccctcctgaccggccggctcccggttcggatgggcatgtaccctggcgtcctggtgcccagctcccgggggggcctgcccctggaggaggtgaccgtggccgaagtcctggctgcccgaggctacctcacaggaatggccggcaagtggcaccttggggtggggcctgagggggccttcctgcccccccatcagggcttccatcgatttctaggcatcccgtactcccacgaccagggcccctgccagaacctgacctgcttcccgccggccactccttgcgacggtggctgtgaccagggcctggtccccatcccactgttggccaacctgtccgtggaggcgcagcccccctggctgcccggactagaggcccgctacatggctttcgcccatgacctcatggccgacgcccagcgccaggatcgccccttcttcctgtactatgcctctcaccacacccactaccctcagttcagtgggcagagctttgcagagcgttcaggccgcgggccatttggggactccctgatggagctggatgcagctgtggggaccctgatgacagccataggggacctggggctgcttgaagagacgctggtcatcttcactgcagacaatggacctgagaccatgcgtatgtcccgaggcggctgctccggtctcttgcggtgtggaaagggaacgacctacgagggcggtgtccgagagcctgccttggccttctggccaggtcatatcgctcccggcgtgacccacgagctggccagctccctggacctgctgcctaccctggcagccctggctggggccccactgcccaatgtcaccttggatggctttgacctcagccccctgctgctgggcacaggcaagagccctcggcagtctctcttcttctacccgtcctacccagacgaggtccgtggggtttttgctgtgcggagtggaaagtacaaggctcacttcttcacccagggctctgcccacagtgataccactgcagaccctgcctgccacgcctccagctctctgactgctcatgagcccccgctgctctatgacctgtccaaggaccctggtgagaactacaacctgctggggggtgtggccggggccaccccagaggtgctgcaagccctgaaacagcttcagctgctcaaggcccagttagacgcagctgtgaccttcggccccagccaggtggcccggggcgaggaccccgccctgcagatctgctgtcatcctggctgcaccccccgcccagcttgctgccattgcccagatccccatgcctgagggcccctcggctggcctgggcatgtgatggctcctcactgggagcctgtgggggaggctcaggtgtctggagggggtttgtgcctgataacgtaataacaccagtggagacttgctt

SEQ ID NO: 137 - DNA, 1501 bp, Homo sapiens
tcgccgctggagcccgggtcgagaggacgaggtgccgctgcctggagaatcctccgctgccgtcggctcccggagcccagccctttcctaacccaacccaacctagcccagtcccagccgccagcgcctgtccctgtcacggaccccagcgttaccatgcatcctgccgtcttcctatccttacccgacctcagatgctcccttctgctcctggtaacttgggtttttactcctgtaacaactgaaataacaagtcttgatacagagaatatagatgaaattttaaacaatgctgatgttgctttagtaaatttttatgctgactggtgtcgtttcagtcagatgttgcatccaatttttgaggaagcttccgatgtcattaaggaagaatttccaaatgaaaatcaagtagtgtttgccagagttgattgtgatcagcactctgacatagcccagagatacaggataagcaaatacccaaccctcaaattgtttcgtaatgggatgatgatgaagagagaatacaggggtcagcgatcagtgaaagcattggcagattacatcaggcaacaaaaaagtgaccccattcaagaaattcgggacttagcagaaatcaccactcttgatcgcagcaaaagaaatatcattggatattttgagcaaaaggactcggacaactatagagtttttgaacgagtagcgaatattttgcatgatgactgtgcctttctttctgcatttggggatgtttcaaaaccggaaagatatagtggcgacaacataatctacaaaccaccagggcattctgctccggatatggtgtacttgggagctatgacaaattttgatgtgacttacaattggattcaagataaatgtgttcctcttgtccgagaaataacatttgaaaatggagaggaattgacagaagaaggactgccttttctcatactctttcacatgaaagaagatacagaaagtttagaaatattccagaatgaagtagctcggcgattaataagtgaaaaaggtacaataaactttttacatgccgattgtgacaaatttagacatcctcttctgcacatacagaaaactccagcagattgtcctgtaatcgctattgacagctttaggcatatgtatgtgtttggagacttcaaagatgtattaattccttggaaaactcaagcaattcgtatttgacttacattctggaaaactgcacagagaattccatcatggacctgacccaactgatacagccccaggagagcaagcccaagatgtagcaagcagtccacctgagagctccttccagaaactagcacccagtgaatataggtatactctattgagggatcgagatgagctttaaaaacttgaaaaacagtttgtaagcctttcaacagcagcatcaacctacgtggtggaaatagtaaacctatattttcataattctatgtgtatttttattttgaataaacagaaagaaatttac

SEQ ID NO: 138 - DNA, 1613 bp, Homo sapiens
  misc_feature 1072: n=a,c,g, or t
ggagttcgagaccagcctgggcgacaggacgagactagtctctgcggagaatgtgaagattggccgagtgtggtggcgtgcacctgtagtcccagctactcgggaggctgaggtgggaggatcgcttgggcctgggaggtcgaggctgcagtgggctgtgatcgtgccactgcactccagcctgggcaacagagcgagaccctgtttcaaaaaaaaaaaaacaaagcagtctgctttgtgcagtgttttcagtaataatccaactgtgaaaacccaactgtgaagacttagggagagagagctgctcccttagcgggtactcagcaggcagccggggagtggtgggcacctgagagctcctgatggtacccaggcagacttcagagaaggaagcgcggggccctgctgcctgggatcccagcagtggagccggctttttggagcaggaggcactgagggggtgttcaggctttccccccatgtttccccattcagggaaggggttgtacaaaagaggaacgcactgtccagtaacgctgcggcgccgtgggcagctctgagcgtggcggtgattggcagcaagtgtgtgagacttggctgtgaaccctgcagccagctctcaggtcagggtgcaggtgccctcagcacactcagcatcccaggaaaggggcggcctcgccccacctccctcccacggccacataccacaggtcccaggggtgcctccggtattgaggctgccttgcctccctttgtccgcactgtccctgtccccttgtgccacctgtgcagacttgagaatggagctcactgtggtgttcatgccggggcctgtctagctcctcaccccacgatttgaccagtgccacaccacgggaccttgtgtgacctcgggcctgcgtcctctggaaaacagctgtggagtggtgtgatgaggacaggtgccttggaaagcatcaggaccttgtgagcacgaggcagctgccagcactccacgttcccgccatgctctcctcaccgtgtgggcatccacctggccagcgccgcctccgcagtgcccctccctctggtngctcccgcgcagcatgcgaaggtgttatctgcccgcgtcctgccttttccccacaccggcacggaggatgccacgtgttcggtggtcgttcggacgtggtgatttgcagggtctcacttcgttgcctaggctggagtgcggtggcgcgatctcagctcactgcagcctcgacctcccaagctcagtagagacggggattcgccgtgttgcccaggctggtcttgaactcctggagtcaagcgatctgtccaccttggcctcctaaagtgatgggattacaggcacgttgcccctggcctcgcaggagtcggccgtggtggaggacctgctgtccgtgctggtgggcgtggacgggaggtacgtcagtgctcagcccctggctgggaggcagagccggaccttcctcgtggaccccaacctggacctgtccatcagggagctggtgcacaggatcctcccagtggccgccagctactccgctgtgaccaggttcattgaagagaagtcttccttcgagtacgggcaggtgaaccacgccctg

SEQ ID NO: 139 - DNA, 780 bp, Homo sapiens
gttgttgtttcaaaaaaaaaccttaattggcaaaacattaagggacttgaatagaattacacttatctttttgtgctgatttatgtcaatccatcattctggttattgatggaagcaaattgcttcctatgttctctaaaccttatgtcccttccatactccatgagtaccacactgggagaaaacaaaagcaaaaagattgtgggaaaagtatagccattatctttgaggaaatgtgtaccaaggcacaatcattaaaaggagttggaggcatcatttggttgacactgttgtcattcttgttctgatcattttggaccttgaagaaattggtgattctctcctagaattagacaaacaaagtgtgtttgaaaataatgattgttttcctgccttaaaaaatatattaacagaaagcttttataacaggctgtttccctctggacaggtattaattctgagtaagaattttcagtgactacataaggatttgtgtaacttatgaaggaagagtccatttctaatcaaataattcacctgttttactagcttatagtgatctgatttcagaattttcctgtatcttttttacatacatcagaaaaagaaatgtttactatatttttggttccatttatgattgtattaagcatttgactataaggaaaactaacaattaaatcaattagaaaagcaacataaaattaaatgatatttaggaaatcagttatatgtgagcttgggtattcaaatgtcacaaataaaaagcatataaccatt

SEQ ID NO: 140 - DNA, 796 bp, Homo sapiens
  misc_feature 666: n=a,c,g, or t
ccttagaaagcggcctttttcccactcttctttcagcttgtcctgctccttctggtatctctcctggagcaaacgttcctgttcctgttgccatttttcctgtcgcctgcgctcctcttctgggtcccatgcccagaacttaaaaggtgtcataacaggtgacttctcactgcttggagaatccacttgagaattgagatttggcaaatgtagttggttggcttcaggcattttgtccagaaatggaaatgtcagcgttgcttcgggttctggagattttggctttaccaccttttgtgacagcaccaactccacctttccactcatttcattttctggtttcttctggtctttttcttccgacacatcattcttcagctgggggctggagggaaattccacaaaggccacggtcgggctgcatcgagtcacagttgttgtaaaatgctgtggttctgatgaggcaagttctatattcccttttcttgattttccaccatcattcttgtcctcttgactattcggttccgttttctcagtggttgcctgaaaaagagatttttttcccccgttgaataaatgattcctttaaaagttctaaaaattattttttaagcagtaatttttaggtcaacaaagtggtttggccatatgaattccctcttntacttcccaggcagcttcatggcgagagcctggtttggtgagatggtgaaccgcatgggtgtcctgttctccatgcggttcaccatctctccaaggcagtcataggaggtttggtgaggaaccttagaaa

SEQ ID NO: 141 - DNA, 2198 bp, Homo sapiens
cacagtggggagcgggcaactctgaccagtgccggcctgcagcctacatgcggctgaggaggctgcggtgggaattgctgggactcaggacgcctgggcagaggttgaggggctgcgcgtggcggggaagccttcatgtagcctctcccagtgtccgggctggtgcttggggaacaagcctgagggccacaggctaatttcccagccggggcagccccacccccgaaggccaagcccgagggtcttcaggttccgggctgagcctgtgtgctttctcgctgcaggtcctgaacgaggctgtgggggccctgatgtaccacaccatcactctcaccagggaggacctggagaagttcaaagccctccgcatcatcgtccggattggcagtggttttgacaacatcgacatcaagtcggccggggatttaggcattgccgtctgcaacgtgcccgcggcgtctgtggaggagacggccgactcgacgctgtgccacatcctgaacctgtaccggcgggccacctggctgcaccaggcgctgcgggagggcacacgagtccagagcgtcgagcagatccgcgaggtggcgtccggcgctgccaggatccgcggggagaccttgggcatcatcggacttggtcgcgtggggcaggcagtggcgctgcgggccaaggccttcggcttcaacgtgctcttctacgacccttacttgtcggatggcgtggagcgggcgctggggctgcatcgtgtcagcaccctgcaggacctgctcttccacagcgactgcgtgaccctgcactgcggcctcaacgagcacaaccaccacctcatcaacgacttcaccgtcaagcagatgagacaaggggccttcctggtgaacacagcccggggtggcctggtggatgagaaggcgctggcccaggccctgaaggagggccggatccgcggcgcggccctggatgtgcacgagtcggaacccttcagctttagccagggccctctgaaggatgcacccaacctcatctgcaccccccatgctgcatggtacagcgagcaggcatccatcgagatgcgagaggaggcggcacgggagatccgcagagccatcacaggccggatcccagacagcctgaagaactgtgtcaacaaggaccatctgacagccgccacccactgggccagcatggaccccgccgtcgtgcaccctgagctcaatggggctgcctataggtaccctccgggcgtggtgggcgtggcccccactggcatcccagctgctgtggaaggtatcgtccccagcgccatgtccctgtcccacggcctgccccctgtggcccacccgccccacgccccttctcctggccaaaccgtcaagcccgaggcggatagagaccacgccagtgaccagttgtagcccgggaggagctctccagcctcggcgcctgggcagagggcccggaaaccctcggaccagagtgtgtggaggaggcatctgtgtggtggccctggcactgcagagactggtccgggctgtcaggaggcgggagggggcagcgctgggcctcgtgtcgcttgtcgtcgtccgtcctgtgggcgctctgccctgtgtccttcgcgttcctcgttaagcagaagaagtcagtagttattctcccatgaacgttcttgtctgtgtacagtttttagaacattacaaaggatctgtttgcttagctgtcaacaaaaagaaaacctgaaggagcatttggaagtcaatttgaggtttttttttttggtttttttttttttgtatgttggaacgtgccccagaatgaggcagttggcaaacttctcaggacaatgaatccttcccgtttttctttttatgccacacagtgcattgttttttctacctgcttgtcttatttttagaataatttagaaaaacaaaacaaaggctgtttttcctaattttggcatgaacccccccttgttccaaatgaagacggcatcacgaagcagctccaaaaggaaaagcttgggcggtgcccagcgtgcccgctgcccatcgacgtctgtcctggggacgtggagggtggcagcgtccccgcctgcaccagtgccgtcctgctgatgtggtaggctagcaatattttggttaaaatcatgtttgtgactgtaaccatttgtatgaattattttaaagaaataaaaatcctgg

SEQ ID NO: 142 - DNA, 2576 bp, Homo sapiens
attcattatggagaaagcatcaggactgttgagtaactcctcctttacttttttcctgctggctacagcatggggtgccctataggcacaagcccagctgaagaacagaatggagggctctgggaggaggcagctcactggagagcctacattccttacacaagtgcctaaagagagtgatgctaacactccatctgccctgtccattgccttcatatacagtctacttcgtgttctgtcaccctttgggcaggggagttctcctgggacagtgggctctgcatgttctccacttggatacattttggggctaggatcagggcactattcctggagggtccagtcattcaccagcatttgcaaatgtccatagggagcaggtggcagcctctactcccagcaacaagtttgtgttctctccttttctctctttgcctcactctctccagttggttttcagctggggcttgaaatgcatttttagccctttgacgtggcttatgccattcaagaaataaaaagcaagagaatcagctttgggcaatgacaagaaatgagttcttactctgatttttttgtaaaaagataatttttgagacttgaaaaataccccgaccttgagattattcctgtttgaaaggtggtgcatgcagatggagaagtggtgttggcagcaagctttggctcatgtggatttggtttaagtggtgcttcttacccaagcttcaaggaagtgcttgggggacccccagcctcatcctcttagttgggtctcttgttccctttgtaccactgttttgccttccttttcctcttctctctttgcctggcttcctttcccttttcttctattcactctgcttgcttgctggccggcctgcctgcctgcctgcctgcctgcctgcctgtctgcctatgtgatgatgaaatctctgcatggctgcaatgatcccactgttagctggcagggtcaggcttagctccttgactgcagaagaccaagaacctgttccccaagcccagagatgtccacctgggctggactgccctcaagcttatactagagaagagcaactgacctgcccaacttgtgtgaagtcaggagggtttctggcattttccacacctgtccactccttggagctggtttctctcattgctttttctaaatctggttctttttctctttacctggggcctggcttttctgagattgtcttagggttgagctatttgggtatcctgggtttgagtgttaggggatggacataaaggaaaaagagtgatgagaagagaatggagagaatttgaataaaaggtgggaaaggagagcactgttctttgattgtttatccagtccaacctgatccattagggatcgaggtgctacactggcctccagggataagcctggggctactgttgctgggaacttaggcttaacataaagccgaagaaggtacctagaaatttgaaacttccctaaaaagctcctaatgcccacctgctagatagcttctctgtggcctcctatttagctaagcagcagtgtttttggatactttttttttctgtttgtgaataaggccagcactcaagatgggcagccaagggtgcactgactattagctggcccataggatatctgtaaggctggtgggacagttttggacctggaatcatgtgtaactaacaaggttggacgtttcttccccatcagggtagaaaaatcatctcaaactagccaaaaggcagttttggaaactacattgggggacgttatttttatttatatatggggcctaggccaatccaggatggtagctggaataccttccttcttaaaatctgatcatggcagggatatgcagggcactttttactatttggccttctaagcagattgggaaggaggtattttctggttttcgctttcctccgacttaataggacttgccttctccctgggcagggagagaggctgggttggtgctctcccttactctactcatactgacttagagcctctggctgctgtttgggcatccaagaaagggaggggaaggaatgagctaaaaacaaaacagaatgaggtgggaaagggagattttcttctttacagaggaaaataggaaaccctccaagaattgtgcaagtaaagacatttgttgaatgcactgagtcccttggtgtagtagcaataaggaaaaatgaaattactttcctgtgcacacagtccagcctaattggtatgtgatgttgcacttagcagccatgtggtgggcatgtgtgactactctggttttcactttagtttctaaactttttatccctctcaagtccagcatggatggggaaatgtctctggatccccacagctgtgtacttgtttgcatttgtttccctttgagatttgtgtttgtgtcctgctttgagctgtaccttgtccagtccattgtgaaattatcccagcagctgtaatgtacagttccttctgaagcaagcaacatcagcagcagcagcagcagcagcacaattctgtgttttataaagacaacagtggcttctatttctag

SEQ ID NO: 143 - DNA, 2229 bp, Homo sapiens
cacacttaaatttgtgcctgatatagggtatattctcaagaagtgttgttaaatgattgaaagcccgttcctaggatgatatgcgtacatttagtcatcagatttcaagacacccaaacatacagtgttgcaaaaataaatccgtcgcttattctgagatagacataataataggcagcagatcctgcctattctccccatgcagtggaggataagacgcactgggagggagacagtgttacagagtgttgctgtcttcagccctgtcagtaactacctgagtcactttgagaagtcccttaacctatctgggccttggttttcccagccttaaaatgagatgttggtcaaggtttgattcagttctctgcattgagcacctgctgtgtgcaagccacggtgctaggattctctacgtgtctcttctaaggcagccactgtggtgttttgtatgtatgtttgttttggcatgggccacactgagttgattgtgtttggtttatatgtctttctcctggcttagttcagtgccttgtacaaagtaagtcctctgcacattttgactctccctttttctaaaccgagggctccttgtgagtatcacgtcgccatcctctgtatctcctgtgtctatcacagttgttggtacataggaggtatgtaggaaatatgaaaatgtgagttgttctgccagaatccccagaccctgcttggagaacaagcctagcttgttgagggcctagctgcacgttccctggcccacttatggagttgggggactcaaatgcattggtattaaaatcaatggagacagcaattctggaccacagccttgacactagaggattgttttctcccaaacagatagtagtcatatattcatttcaaacagcacagtggagcggagaaagacttgttaccagttaagatcagattcatcttaaccatgaaaatgaattatagatgtatccctgcattcaggtgtttaaaaacatttaagtgttttttcataacttcttttggttttcccacacttctgagtttatgtgccaggactagtaactagaaattttagggatattgatttagctcagtggaagatattttttattgtaagagcaactccctaccagactgcattaggaagccctgaattctgtgtcaagccaaggctaaatgtccactctccagggaacatgaagaatcaatgcctgtgtgggagatgaggtactattagagcacctgaaaagtcctttgcttttgatttgttcatcaaatagttattgagcaccggttatagaccagcgtccatgctgggctctgggaatatagcagcgaacaaagagaaatggcaccttccctcttggaatttatagactagagctgagctgtccagtatagtagctagtagccacatgtggctattgaaattaattagattgaaataccattaaaaattcagcttctcggtcatgctagccacaaatgctctgtaggcacgtgtggctagtgactgccctacggtcggcatgggcagttgtagagtgtttctgtaatctcaggaggaactcttaggcaggctgatcatagagctaagattctgtgtttctagacccgacatttatgattagcatttcatggtggaggcaactgaggcacagaaaagccatttgtttaagactgagctaggaacaggtctcttatctttgagtgtggctcttctctccctgaggtgaggtagggcaactgagagtatagtctttgcactcaggctgcctgggttcaaatcctggctttgctacttcctagatttaggtcttagggcaagtcactgccctgtgcctcagttgtatcacctgtgaaatggaggaagtaatagcacctacctcacaggattgcagggaggattagatgacccagtcattcaagtctttagaactatgggctgggcctggtggctcacacctgtaatcccagcactttgggaggtcgaggtgggagagtcagttgagcccaggagttcgagaccagcctgggcaacatggggagacccccatctctacaaaaacttgaaaaattagctgggtgtggtggtgcaagcctgtagtcccagctacttggaaggctgaggtgggaggatctcttgagcctgggaggttgagcctgcagtgagccaagatcacagtactataccactccagcctgggcaacagagcaagactccaacac

SEQ ID NO: 144 - DNA, 794 bp, Homo sapiens
gtataacacacccagtgaggtctctggagccgcggtgcgggaagcggggacccgggtttgaatcctgcccctctggtgtggtgcggcctcttcccacagacttttggcctcagtgttccccgcctgggaagtggggactggccctggtacctggctccagagctgcacccagaggcgatcagcccggtgcgggaacggggcggggtggccgcaactacgggccacggatcctgacccgccctgcccacgatgactatccacatcctcatcctgctgttgctcctcgccttctccgcccaaggggacctggacactgcagccaggcgaggccagcaccaggtcccccagcaccgcgggcacgtctgctacctgggcgtatgccggacccaccgcctggcggagatcatatactggattcgctgtctccaccaaggagccctcggggaaggccagccacgagccccaggacccctacagctatgggcgccgccggtggcgcgaggcggaagcccggctcggttcccaggattccggcctgcagcgagggggctagcgcagtgcccagctcgctgggtgacctcgggcacggctcgtcccctcctcggcttcagtttgcctatctgtatgttggagcttctactccacatttcttctcccctaactccagcccctgaaaccgtcttccccagtccctccccgggctgcgactaggttggacctagaagcacacgggaccaggctgggcgaagaacactgacgcccagagccgaataaacaagagttccgtttgtaag

SEQ ID NO: 145 - DNA, 1216 bp, Homo sapiens
agaaaaccacctggagcccccagaactggcagacacctgcctgatgctgccatgggcccccagctccttggctatgtggtcctttgccttctaggagcaggccccctggaagcccaagtgacccagaacccaagatacctcatcacagtgactggaaagaagttaacagtgacttgttctcagaatatgaaccatgagtatatgtcctggtatcgacaagacccagggctgggcttaaggcagatctactattcaatgaatgttgaggtgactgataagggagatgttcctgaagggtacaaagtctctcgaaaagagaagaggaatttccccctgatcctggagtcgcccagccccaaccagacctctctgtacttctgtgccagcagttttagccgtcccgggacgggtttgaacactgaagctttctttggacaaggcaccagactcacagttgtagaggacctgaacaaggtgttcccacccgaggtcgctgtgtttgagccatcagaagcagagatctcccacacccaaaaggccacactggtgtgcctggccacaggcttcttccctgaccacgtggagctgagctggtgggtgaatgggaaggaggtgcacagtggggtcagcacggacccgcagcccctcaaggagcagcccgccctcaatgactccagatactgcctgagcagccgcctgagggtctcggccaccttctggcagaacccccgcaaccacttccgctgtcaagtccagttctacgggctctcggagaatgacgagtggacccaggatagggccaaacccgtcacccagatcgtcagcgccgaggcctggggtagagcagactgtggctttacctcggtgtcctaccagcaaggggtcctgtctgccaccatcctctatgagatcctgctagggaaggccaccctgtatgctgtgctggtcagcgcccttgtgttgatggccatggtcaagagaaaggatttctgaaggcagccctggaagtggagttaggagcttctaacccgtcatggtttcaatacacattcttcttttgccagcgcttctgaagagctgctctcacctctctgcatcccaatagatatccccctatgtgcatgcacacctgcacactcacggctgaaatctccctaacccagggggaccttagcatgcctaagtgactaaaccaattaaaaatgttttggtcttg

SEQ ID NO: 146 - DNA, 962 bp, Homo sapiens
ctgtgaggtgggcacagatggtctgctggccacatcgctggacgccacctgtgacgttgcctgcttgatgtttgatggcagtgacccaaagtcctttgcacattgtgccagcgtctacaagcaccattacatggacgggcagaccccctgcctctttgtctcctccaaggccgacctgccgaaggtgtcgcggtgtctggccatcaccggccgagttttgccgcaagcaccggctacccgctcccgtgccgttctcctgtgctggccagccgagcccagcaccaccatcttacccagctcgcaccatggccgcttccacatttggtccacgcagagctgcatccctcttccttctggctccgggggctgcttggggttgtcggggccgccgtggccgcagtcctcagcttctcactctacagggtcctggtgaagagccagtgaggcccctggtacccaagccccctcccctgacctgggtgtgcctcgctgctggggctctgcaggggcagcacagctggggtgcaggccaggctgccactccgggaacgcctttgcgccgggactttttgtttctgaaggcagtcgatctgcagcggggccttatgctgccatgcactgccctggctcctgccggacccccagggtgggccgtggcaggtggctgagcaggagctcccaagtgccggccaccgctgtcagggattgcccacccctgggcatcatgtgtgtggggccggggagcacaggtgtgggagctggtgaccccagacccagaattctcagggctctacccccctttcctggtcctaggtggccagtgggtatgaggagggctggaaggcagagctttgggccaaaagcaggcgttggggggtcccccctcaagtttggagccgtttccgtggttgtagcagaggaccggaggttgggttcctgattaaacttcactgtgtgttttc

SEQ ID NO: 147 - DNA, 1229 bp, Homo sapiens
aaagacttcctgcgatgagaacagaggcacaggtgccggccctgcagcccccagaacctggactgtagggggccatggggcaccggaccctggtcctgccctgggtgctgctgaccttgtgtgtcactgcggggaccccggaggtgtgggttcaagttcggatggaggccaccgagctctcgtccttcaccatccgttgtgggttcctggggtctggctccatctccctggtgactgtgagctgggggggccccgacggtgctggggggaccacgctggctgtgttgcacccagaacgtggcatccggcaatgggcccctgctcgccaggcccgctgggaaacccagagcagcatctctctcatcctggaaggctctggggccagcagcccctgcgccaacaccaccttctgctgcaagtttgcgtccttccctgagggctcctgggaggcctgtgggagcctcccgcccagctcagacccagggctctctgccccgccgactcctgcccccattctgcgggcagacctggccgggatcttgggggtctcaggagtcctcctctttggctgtgtctacctccttcatctgctgcgccgacataagcaccgccctgcccctaggctccagccgtcccgcaccagcccccaggcaccgagagcacgagcatgggcaccaagccaggcctcccaggctgctcttcacgtcccttatgccactatcaacaccagctgccgcccagctactttggacacagctcacccccatggggggccgtcctggtgggcgtcactccccacccacgctgcacaccggccccagggccctgccgcctgggcctccacacccatccctgcacgtggcagctttgtctctgttgagaatggactctacgctcaggcaggggagaggcctcctcacactggtcccggcctcactcttttccctgaccctcgggggcccagggccatggaaggacccttaggagttcgatgagagagaccatgaggccactgggctttccccctcccaggcctcctgggtgtcacccccttactttaattcttgggcctccaataagtgtcccataggtgtctggccaggcccacctgctgcggatgtggtctgtgtgcgtgtgtgggcacaggtgtgagtgtgtgagtgacagttaccccatttcagtcatttcctgctgcaactaagtcaagcaacacaagtttctctgatgtc

SEQ ID NO: 148 - DNA, 1389 bp, Homo sapiens
  misc_feature 41: n=a,c,g, or t
ctggagcctgccgggagagtggtggcatctgagaggctggncgtggactgtggttgggggaggtgggagctgttttaaccgtgtgccccctctcctgtgccggcgtgggcatcccccggggcagtggaacgcgggcgctcctccagcttccgagtccagccagcctgggcgcggggcgccgcccccgagacacccgaggagtccgttcctccctggttacgtggactgaggagctggtctcttgtggctcagcgccgtgcggaggttgaagcgtacctgcggaggtcgcaccagggcgtgaggaggaggaggaagggcatgagccgagcttgaggaatccgtgctccaaactctacactcaagggtggcccttgggtagggtgaagatcccctgtctttatcctagttccacaccttggtgtgggttactgggtgcaggatgaactgtcgctcggaggtgctggaggtgtcggtggaggggcggcaggtggaggaggccatgctggctgtgctgcacacggtgcttctgcaccgcagcacaggcaagttccactacaagaaggagggcacctactccattggcaccgtgggcacccaggatgttgactgtgacttcatcgacttcacttatgtgcgtgtctcttctgaggaactggatcgtgccctgcgcaaggttgttggggagttcaaggatgcactgcgcaactctggtggcgatgggctggggcagatgtccttggagttctaccagaagaagaagtctcgctggccattctcagacgagtgcatcccatgggaagtgtggacggtcaaggtgcatgtggtagccctggccacggagcaggagcggcagatctgccgggagaaggtgggtgagaaactctgcgagaagatcatcaacatcgtggaggtgatgaatcggcatgagtacttgcccaagatgcccacacagtcggaggtggataacgtgtttgacacaggcttgcgggacgtgcagccctacctgtacaagatctccttccagatcactgatgccctgggcacctcagtcaccaccaccatgcgcaggctcatcaaagacacccttgccctctgagcgtcgctggatctctgggagctccttgatggctcccagaccttggcttttgggaattgcacttttgggcctttgggctctggaacctgctctgggtcattggtgagacttggaaggggcagcccccgctggcttcttggttttgtggttgccagcctcaggtcatccttttaatctttgctgatggttcagtcctgcctctactgtctctccatagccctggtggggtcccccttctttctccactgtacagaagagccaccactgggatggggaataaagttgagaacatg

SEQ ID NO: 149 - DNA, 676 bp, Homo sapiens
cctgggaggaagccgactaggcgaattcacttactgaccggcctgggctgctctgagacatggaggaagccagtgaaggtggaggaaatgatcgtgtgcggaacctgcaaagtgaggtggagggagttaagaatattatgacccagaatgtggagcggatcctggcccggggggaaaacttggaacatctccgcaacaagacagaggatctggaagccacatctgagcacttcaagacgacatcgcagaaggtggctcggaaattctggtggaagaacgtgaagatgattgtccttatctgcgtgattgtttttatcatcatcctcttcattgtgctctttgccactggtgccttctcttaagtaacagggaacctctcccacctgcccttcttttcagggacaaccctccataaatgtgtgccaagagggtctcctttcctgtcttcctctacagagaatgctgctcggtcctcctacccctcttcccgaggccctgctgccacgttgtatgccccagaaggtaccttggtcccccggaaggagagaaaaaagagagatggactgtggctgcatttcttgggtccttagagtgggctggagagacctagagggcccagcatgtggctgggaaactgttggtggccagtgggtaataaagacctttcagtatccct

SEQ ID NO: 150 - DNA, 1163 bp, Homo sapiens
cggcggctttcttgtgttggccagcggtgctggggagctgtaccgccggaaacctcgcagccgctccctgcagtccaccggccaggtgttcctgggtatctacctcatctgtgtggcctactcactgcagcacagcaaggaggaccggctggcgtatctgaaccatctcccaggaggggagctgatgatccagctgttcttcgtgctgtatggcatcctggccctggcctttctgtcaggctactacgtgaccctcgctgcccagatcctggctgtactgctgccccctgtcatgctgctcattgatggcaatgttgcttactggcacaacacgcggcgtgttgagttctggaaccagatgaagctccttggagagagtgtgggcatcttcggaactgctgtcatcctggccactgatggctgagttttatggcaagaggctgagatgggcacagggagccactgagggtcaccctgccttcctccttgctggcccagctgctgtttatttatgctttttggtctgtttgtttgatcttttgcttttttaaaattgttttttgcagttaagaggcagctcatttgtccaaatttctgggctcagcgcttgggagggcaggagccctggcactaatgctgtacaggtttttttcctgttaggagagctgaggccagctgcccactgagtctcctgtccctgagaagggagtatggcagggctgggatgcggctactgagagtgggagagtgggagacagaggaaggaagatggagattggaagtgagcaaatgtgaaaaattcctctttgaacctggcagatgcagctaggctctgcagtgctgtttggagactgtgagagggagtgtgtgtgttgacacatgtggatcaggcccaggaagggcacaggggctgagcactacagaagtcacatgggttctcagggtatgccaggggcagaaacagtaccggctctctgtcactcaccttgagagtagagcagaccctgttctgctctgggctgtgaaggggtggagcaggcagtggccagctttgcccttcctgctgtctctgtttctagctccatggttggcctggtgggggtggagttccctcccaaacaccagaccacacagtcctccaaaaataaacattttatatagac

SEQ ID NO: 151 - DNA, 1044 bp, Homo sapiens
gtggctgtaaatggtaaacccatgctaggagttatacataagccattttccgaatatacagcttgggcaatggtagatggtggttcaaatgtgaaagcccgctcttcctacaatgagaagaccccaaggatcgttgtgtctcgttcccattcagggatggtcaaacaggtcgctcttcagacttttggaaaccagactacaattatcccagctggtggtgctggttataaagttttagcacttttggatgtgcctgataagagtcaagaaaaagctgatttatacatccatgtgacatacatcaaaaagtgggatatatgtgctggtaatgccatcttaagccctaggggggcatatgactaccctgagtggtgaagaaatcagttacactggttcagacggcattgaagggggactccttgctagcatcagaatgaaccaccaggccctggtcagaaaactcccagatctagaaaagacaggacataaatgagcataactgattacagggtacagttcttcacagctgaaatggttagcctgagatgctggaagcttcaaaggattggtggagactatgcatggttaaggccatcccgaactttttaaagtatttatgaagcatcagagacttattttccctgtaatagaatgcaaaatcagggaaaatgggttgctttgtgtctcaagtattgtctttatttttgagactattttcatacagttgtcatacacaaggcgcatatatatatttgtgaattaaaatctgtagctgagtctacattgttatgagtcaccattttcacacaacatcatgaatcttcactgttagtactttcatatagaattcggttgaaggaaagattgatttttgtgtagatgtttaatataactttacaactatatctcattgaaaataaagtcattggggatttttacctctaatttggatggaaagcacaagaagccacacattcattaatatgcaacaaatgttgtatttatgttactgaatatttctatggattaaaatagaaaaagttt

SEQ ID NO: 152 - DNA, 1072 bp, Homo sapiens
aaagatttcactgagtattttagatactagtgcaaataaagatagaaaatcttgatcataatgtcttaagtttgggaactgtgatattaagaaaagaaattcccttctagaggtgctggccaaaaagccttttgggctaacttaagtattaaatttatatatttaaataattatattttaagttgtagaggattttcccaaggattttatgcttacttgaatgttctttgaatgttcagatgcatatcctaactggatgcttctcaaggccttactgcatatttgtgttgcatatttatgttagttgcaccagggccatttgtagtttgggcaaccgaatgcctaattggaaaaaaggcattgtggtttcccctatgatctaaattgttacattttaccatttcattccgaagttggttttactttattaaatgaagatttagttttcatatcgtatacatagctgtatagatttcaaaattaggttgttaatttgtgtcacttactatttttgtgttggtaatgctttaaatgcatacttaaaaatgaagtactgttatctaagctactgtgtttagaaaatgttaagaatgagcagaaatttttatagaaaagtataaacggaagaagagataagatactgcgaataggccctcaaacttaaaaaagaaaaaactttgccagttttaaggacatattttgattctttcagtattcttaacacctttttaaacaaagttcttgatagtacccactattattgggtttgttttatgccattattgattcttgatattcaagcatttacaatgtagcatatttgattttcttttttctttctttttttggcatcattaacatttcatttgaaatgcatattgttcttgaagtactttgtttttagcataaatgttgtgcattttatcttagtgtttggatgaaaacatttgtgttgtttagctttcatttgctttgtatattgataatgtacctttattttccagtatgcctacattttgtattgcacataaatttattttaagcggaaaaaaaaaaaaaaaaaaaaaaaaat

SEQ ID NO: 153 - DNA, 1121 bp, Homo sapiens
gtggcttctgcctgcgccagtttccccgctccctcctggagaggcaccagaaagaggaatgccaggacagggtaacccagtgcaagtacaaacgcatcggctgcccatggcacggccccttccatgagctgacggtgcacgaggctgcgtgcgcccacccgaccaagacaggcagtgagctgatggagatcctggatgggatggaccagagccaccgcaaggagatgcagctgtacaacagcatcttcagcctgctcagcttcgagaagattggctacacagaggtccagttccggccgtaccgcacagacgacttcatcacgcgcctgtactatgagacgcccaggttcacagtgctgaaccagacgtgggtcctgaaggctcgagtcaacgactcggagcgtaaccccaacctgtcctgcaagcgtacgctctccttccagctcctcctcaagagcaaggtcacggcaccgctggagtgctccttcctgctgctcaagggcccctacgacgacgtgaggatcagccccgtcatctaccactttgtcttcaccaacgagagcaacgagacggactacgtgccactgccatcattgactccgtggagtgcaacaagctgctggctgccaagaacatcaacctgcggctcttcctgttccagatacagaagtagggcggggcctcaggatgtccgaggagcccacgggcggcatcccagcaccgctgccctgtccacctggctggcagctgcttcacaggactatctgatcactttagcaaaggaggagaacaaacgaagccaacacagggcaagtctgcatgcgtgcgcgacggggccccggcctccggctcacccccccgacccctgcctcccctccttccgagggccgccagaggcttgggctgacccgaagaggagacggtgcacaaggcgccccgaggctaagagacggtggcagcaaggaggccgagaggcacagcgaccctgccccagcccttctgtgcagtcaggcggcggtgctgctccatccctgcgggttccggcggggcgcgggggccttgctgacatcagacgggatatccgaatatctgatagcaattaaaaggcagccttgtttcgt

SEQ ID NO: 154 - DNA, 722 bp, Homo sapiens
cgcttttttcctaaagacagaaggtttttggtctgttttttcagtcggatcttctcttctctgggaggctttggaatgatgaaagcatgtaccctccacccttttcctggccccctaatggggcctgggccctttcccaacccctcctaggatgtgcgggcagtgtgctggcgcctcacagccagccgggctgcccattcacgcagagctctctgagcgggaggtggaagaaaggatggctctggttgccacagagctgggacttcatgttcttctagagagggccacaagagggccacaggggtggccgggagttgtcagctgatgcctgctgagaggcaggaattgtgccagtgagtgacagtcatgagggagtgtctcttcttggggaggaaagaaggtagagcctttctgtctgaatgaaaggccaaggctacagtacagggccccgccccagccagggtgttaatgcccacgtagtgggggcctctggcagatcctgcattccaaggtcactggactgtacgtttttatggttgtgggaagggtgggtggctttagaattaagggccttgtaggctttggcaggtaagagggcccaaggtaagaacgagagccaacgggcacaagcattctatatataagtggctcattaggtgtttattttgttctatttaagaatttgttttattaaattaatataaaaatctttgtaaatctct

SEQ ID NO: 155 - DNA, 373 bp, Homo sapiens
aagacatcctatctagctgcaaggtataattgatggattcttccatcctgccggatgagtgtgggtgtgatacagcctacataaagactgttatgatcgctttgattttaaagttcattggaactaccaacttgtttctaaagagctatcttaagaccaatatctctttgtttttaaacaaaagatattattttgtgtatgaatctaaatcaagcccatctgtcattatgttactgtcttttttaatcatgtggttttgtatattaataattgttgactttcttagattcacttccatatgtgaatgtaagctcttaactatgtctctttgtaatgtgtaatttctttctgaaataaaaccatttgtgaatat

SEQ ID NO: 156 - DNA, 1027 bp, Homo sapiens
gttattttatgggatggattcacaggacagaggtcaaaggtctatcaggagcatgagaagaggtgttggagtgttgactttaatttgatggatcctaaactcttggcttcaggttctgatgatgcaaaagtgaagctgtggtctaccaatctagacaactcagtggcaagcattgaggcaaaggctaatgtgtgctgtgttaaattcagcccctcttccagataccatttggctttcggctgtgcagatcactgtgtccactactatgatcttcgtaacactaaacagccaatcatggtattcaaaggacaccgtaaagcagtctcttatgcaaagtttgtgagtggtgaggaaattgtctctgcctcaacagacagtcagcttaaaactgtggaatgtagggaaaccatactgcctacgttccttcaagggtcatatcaatgaaaaaaactttgtaggcctggcttccaatggagattatatagcttgtggaagtgaaaataactctctctacctgtactataaaggactttctaagactttgctaacttttaagtttgatacagtcaaaagtgttctcgacaaagaccgaaaagaagatgatacaaatgaatttgttagtgctgtgtgctggagggcactaccagatggggagtccaatgtgctgattgctgctaacagtcagggtacaattaaggtgctagaattggtatgaagggttaactcaagtcaaattgtacttgatcctgctgaaatacatctgcagctgacaatgagagaagaaacagaaaatgtcatgtgatgtctctccccaaagtcatcatgggttttggatttgttttgaatatttttttctttttttcttttccctcctttatgacctttgggacattgggaatacccagccaactctccaccatcaatgtaactccatggacattgctgctcttggtggtgttatctaattttagtgatagggaacaattctttgataaaaataataacaaacataaaagtttatgagcac

SEQ ID NO: 157 - DNA, 790 bp, Homo sapiens
gcattactgaaacagtcacagttgaccctgggtcaataattccactgttgggcctcacacagtaccggtgaggcacggtagtcttcactttgaaacacacttttctatccgatggatttcgcaatttaagatttgtagtgactacatctgtgaaggggcctttgaatttgaggtctatgggcgggtcgaggaccaggatctgctcgtgcttcgccgtggccccggaggcagacgccattggagagacagcgcagagcagggggcggcttgctcgctgggggcgggggacgatggcgagaggggagggggagcgagttcgcatctctccttttcctggttagactctgttcaaccacattcttatgttggcagatctgcttccagattgatttttagagcaccatcactttcacattcctgattctgattttgttttgttttgtttgggttttctgaaacttaaaatgctgccccgaaaatactatatttttgagtttgtgttctgaaagcctccgtgctgctggatctttggggggaaatacaggatccttcagcactgaggtgtttaagatttgcaactagcaatgcaattttttctaaatatggggatatttacctttattaagaaattatactaaacattgatgtccttgatcattttatgttctcatattacttttgattctactatgattgtgtggtggtgaacaaagatcattacaaacaaaaactgtaattttgttatatttgattcaatggaatttacctaaaaaataaagactaaaaatgt

SEQ ID NO: 158 - DNA, 526 bp, Homo sapiens
tgctaaatgatcgcaaattcacctaaacaatacatttacaaagccatctttacatgcattaaacgagggctacaacaatattgttttacaaatactagcacttttttttctgttatgtacttagtgttagagggtcaaaataatctttctgcttagcatctcttaaaccatacctgcaaatatagcaggattattacatttacagtactttaatacttgtataaactatgcagaaatttttaataaagtgtaatatattttataagctaataagactgaatgggtaaaggtttttagcatgcgttagtatacttgcagatactgaaacattttggtaatctttcttactaaagatgtgaatgtttaatgtaccttctctgtttctactctgtagtccaatgggaattcagtaatgacattttgtcatgtcaaactgtgaacataaatttgtactgtacagtcctcatatactatatacagtatgcaatatatattatatacttgttaataaaaccatcagaatatt

SEQ ID NO: 159 - DNA, 778 bp, Homo sapiens
tgctgcgttgtgaggggtgtcagctcagtgcatcccaggcagctcttagtgtggagcattgaactgtgtgtggttccttctacttggggatcatgtagagagcttcacgtctgaagagagagctgcacatgttagccacagagccacccccaggcatcacatgttggcaagataaagaccaaatggatgacctgcgagctcaaatattaggtggagccaacacaccttatgagaaaggtgtttttaagctagaagttatcattcctgagaggtacccatttgaacctcctcagatccgatttctcagtccaatttatcatccaaacattgattctgctggaaggatttgtctggatgttctcaaattgccaccaaaaggtgcttggagaccatccctcaacatcgcaactgtgttgacctctattcagctgctcatgtcagaacccaaccctgatgacccgctcatggctgacatatcttcggaatttaaatataataagccggccttcttcaagaatgccagacagtggacagagaagcatgcaagacagaaacaaaaggctgatgaggaagagatgcttgataatctaccagaggctggtgactcctgtgtacacaactcaacacagaaaaggaaggcccgtcagctagtaggcatagaaaagaaatttcatcctgatgtttaggggacttgtcctggttcatcttagttaatgtgttctttgccaaggtgatctaagttgcctaccttgaatttttttaaatatatttgtgacgt

SEQ ID NO: 160 - DNA, 1147 bp, Homo sapiens
tgatattataaaatcacagtagcaatattggaatgtcattttcatggttgaacattaatgtatttacttgctaacatttcagtgaattataaatatttaaccacttaacatggacaaaacattatggagaatttaaattattataaaatgttttctctcccctaaagaagatttttgtttgagccaagacaaaaacatgaaaatttaatgcagaccctctataaaaagtattattgtatgtcatctttaacttattaaatgaaagctttcaaacagtggtaaagaagagggtagcaaatgcccatccttaaattatcaacattttccaaatcatttttaaaccaacttgtaaatgtcatttttaatggtacaacgttatgttattttgttaaaccatagtgaaatttaaaatatgtatccattgattactgtgtgttgtgcctgtgtattccttctgttttctagattttgcatttgttggatttgttagtagtgaagatactatggtgaagatgaaggaagaaagagtagtgttcctaaatccttgccataaaatcactagtaatcttactgtttaattaaacaatagttaatgaaactccttatcaagcattgtgctatgtgctgaaacatatataaaagtttaagtatttcctagttttaaaacaagtctttactacaatctgtctcttttctacaaaattttaatgtaagtgcacattttgttttcatgaccagagttacctgttttggataagattatcaaaatttactctaaatcatataagaaaatgagacagagaacatttgcccaatgcatgaaaaatgatgccacttgaggccttttctttttaagaatgcagttatgggccgggagcgatagctcacgtctgtaatcccagcactttggggactgaggcgggaggatcacgaggtcaggagattgagaccatcctggctaacagggtgaaaccctgtctccactaaactacaaaaaattagccgggcgtggtagcaggcgcctgtagtcccagctactcgggaggctgaggcaggagaatggtgtgagcctgggaggcagagcttgcagtgagccaacatcgcaccactgcactccagcctgggcaacaaagcgagactccatctc

SEQ ID NO: 161 - DNA, 636 bp, Homo sapiens
cagatcgaagtatttcacaagaatacttgtgtttttaacagcccttcccctggacggtgcggccatgagggcctcatgttacggcattgccttttctttctgtggatccagtatcttcctcggctttttagggagcaggaaaaatgcgtctgagagcaactctttttaaaaacctgccctgttgtatataactgtgtctgtttcaccgtgtgacctcccaagggggtgggaacttgatataaacgtttaaaggggccacgatttgcccgagggttactcctttgctctcaccttgtatggatgaggagatgaagccatttcttatcctgtagatgtgaagcactttcagttttcagcgatgttggaatgtagcatcagaagctcgttccttcacactcagtggcgtctgtgcttgtccacatgcactgggcgtctgggaccttgaatgcctgccctggttgtgtggactccttaatgccaatcatttcttcacttctctgggacacccagggcgcctgttgacaagtgtggagaaactcctaatttaaatgtcacagacaatgtcctagtgttgactactacaatgttgatgctacactgttgtaattattaaactgattatttttcttatgtcac

SEQ ID NO: 162 - DNA, 1224 bp, Homo sapiens
ttgaattctagaccttttttctagaaatgttcaatttgcttccaataacttctgccattttcagtttgcttgtatgctcagaaagcattgctgtgaaacagtctagagcctcttgaaaaatatttaatgatgctgataaagatgaactgtcaaagctatgggcaatcctattacaccaattcagcagatcccttagagataattctcttccctcaagggttggtcttttgttttctcttctggcttctgaaacttcttcaggtgcctgttcacatccaacagaactatcactccaagagtgatgtttctctccagtaagttggatataaatgtcaagcaggtgatcaaccactgccaataggctaggatatctgctctgaagaacctcattcagttctctcttatccaggttatccaggtgaattttggtccaatatttgtctagcaaagtagcatgactgtttagcggtcgataccaatttcctccacagctcaagagtctcctggttgcaaaaacctgaaatccaggtgccactttcagacagtcacctcggccaggaatcaagagctctccattctccaagagagggatcagcacagaaaccacgtctaagggggcatagtcaatatcctccagaaggatccagtggcccattgtggctgcctgtgtcagggtgccaggctgccacacaaactctccaggaacatctgtgcagcgatacatccccaaaagcatcttactgtcagtctgatctccaagctggactttgagaagctgaggaggctttgttctacctgtcactgcagctaaatattcaactaaggaagttttgccacatcctattggtccttccaacaacacagcattctgagaagcaaccgccatagccagggtctgaagacttttgcagacagactcaaccagcacataagacctaagggccagctcctgttcacgtgaagaactcctattaccacccagctctccaggggctggcagctgcccaggcagcaccacaccacaaacagctgtcaccctaggggagaggtcagacgaaacaagatgtccctgtaagtactgcagctccttctgttacgccaaagggagacttctggattggccaaaaccaaggccttctccaagtcctgcaactgggcctcttctaataacctcaacctgaaatggatcaattcatcactattaaatatcttctattctagact

SEQ ID NO: 163 - DNA, 1015 bp, Homo sapiens
gcagggctaccatctcactcttctgtaatttcacaacattctaaaggaagtaaatcaccagatttgctgatgtatcagggtccaccagacactgcagaaataataaaaacattacctcagaaatacagaaggaaacttgtgtctcaagaagaaatggaatttatccaacgtggaggtcctgaataaccatggtggctgctgtttgtcatcagacaatagaattgtctttacaataaaggacttccaaaatgacagatgagaaactgtatattaaacacctttaataaatattatgaaaaaaatgaaatatagaaaatttagatggacacttgtatttcctaatttatgtatcttggtcagcttctccacaagcttacctaattgtttatatactttatacttattaaagtatacatttttaaatgttagcctattaatttactcttgattatcaaacattaccagtgttgaactattaaaagcacacaatgtgtagtaaactatcataggattcccataatttcactttactttctgtttaggcatggaaaaatttatcagtcagaattgctgttttagggacatgattttcctgaaattgggtgaggatcagtgaaataattactctattacttgttcttaattctctgttctctaatgttttttcattcacaagtttactggagtataactggcttagtaagtatatcctactctgaatgataaaaatatagtcaagctaaaataggtgactatactattaagatagagatcatacaaaagattccaaagaaagtcaaaaagtgtaaaatggaaaataagagatcaaaatgaatatagcataggaataaagatttcactagaaattgcaatttattatgttttggaggttgtaaggaagtcttgttttttggtttattttactgttttgtgatcttgtatgcaaatcctgataaccattaaccttctcaaacttaatgtctgagagcctcataaaatcaacatatttacttat

SEQ ID NO: 164 - DNA, 1167 bp, Homo sapiens
gtcattattgatttcagagtaactctgagtaatcaaataggtaaaagcatgttttgagtaaaatagctagatttatactttacttgtatacagacttaacaacaaccggtattgactggattgacagctaaagtatcagaatgaaagcaaggtttttttgatgttacctgactgtcataaagatgaaaatgatttgtattggtatgaaatgcttatctttattctacttcgtaagggtaagttttatttatactctttggactcccatgaacttttgcacactgctttgtgttttggtttaccctaaactaccatcctttttatctttgctttttttcttcctattcagaaaagagcaaaatgtgaaaagacacaagactctcaggtatagaatgaactgagcaatttggagaatgtattggactttgtcctctcttattcccccctcctagccctgcaagttgctaggtacttgtgaggcagtgtactggagaggggagagcatggatcctggggtcaaagggcctttgcccccacccttacttggccctctacctgcaggtgaccactggcacattctcctgcttgtctcagcttcaggttcttcacctctaagatggggatgatgaaaacagtacctgtcatgcagaattgttgggaggattgataatttagatgtttatacatgtaatgtacttagatcagtgtctgctcttttcacttgatatccagtactatgtaagatagaaggtgcatgtcttctgtattctgtatttcccatttcttttgcgtgcagtctttgattcgtacaatagaaggaacacgtagaatgtatatttgtacattcatgtcaacatagtatttgaaattgctaccaaactcatttaatttggcataagactaacagatgaagtctctcatttgcttgaagatattttacaaaataccaactgttctatatttctttagaaaaagattatagttattaatattgatacctctgataatattttattcttaaatcttcagtgattccttttactatagattcatgacagctaattagtactaactgatttagaggtgttcctttcccatcatttggaatgatgtaaagaattcagatacaaactactgcaattagaaaataaaatatgaacaactttc

SEQ ID NO: 165 - DNA, 1253 bp, Homo sapiens
ggaagctgacggtgttcactgtgctgtgtgagcagtaccagccatccctccggcgggaccccatgtacaacgagtacctcgaccgcataggacagctgttcttcggcgtcccgcccaagcagacgtcttcctacgggggcctgctcgggaaccttctgaccagcctcatgggctcctcagagcaggaggatggggaggagagccccagcgacggcagccccatcgagctggactgaactggccaggccacgtggagacaccacggtcgacgacggctggagggacgtttcagaggcgagtcctgggtggctcctcgccttgggggctcctggccctgaagctggcggtggcgcatgccggcgcgtgtctgtttctgtgcggcggctcagggtggcgcggctgctgctcactgtgctgctgggacccaagagtggggcgtcgccctgctggccgccgcgtcccccgagattgacccacaataaagcacaggccttaccgcggcgtcaccctctcccactcctttgttctgggtcctttcaggagggctgatgggcagcacaggaggcccgtcctcggggggctgcgcacatcacgctccttgccgggcgtccggcacagctgcggtcaccaaagcaggtgctggccctcggacctgagagcccagccagggcccatgtggtctgcaaatgggagcggctgtttttgaacacggggtcattctgcagtcaggacgaaccggtccccgtcgcagacggagtgcacgtgccctgcgccacatcctcacgctcggtggagggacgcgtgcggcgggacggtgcctacgggtacttgcagctgtgtcccatgtggcatcccagagctgcgccctgctggtctctgtgagcgccacgctgctgtgctggaaatgccgctttaaaaagggataccgtgggactctgcccgtctctttcataacgcaatatttatttgtattgggtgacgattgattctttcgacctaacattttgggttttaaccaaataaccggtccaggagtgagcagctccgttctgtcagatgctactccaaatgttaccagaacgatgacaaaaggggagacgctctattttttcacagttaaatgacagttgtagattgatacgcagttgtgcttgggaaggggaaacgcacagctttatttactgtaaagtggaatttcaggaaggcttgtgtgaaccgttgcgcataaataaaccctttctaccgggctgtgc

SEQ ID NO: 166 - DNA, 1328 bp, Homo sapiens
accccacacaactcatggccaggattgagtcctatgaaggaagggaaagaaaggcatatctgatgtcaggaggactttctgtttgtttgtcacctttgacctcttattcgtaacattactgtggataatagagttaaatgtgaatggaggcattgagaacacattagagaaggaggtgatgcagtatgactactattcttcatattttgatatatttcttctggcagtttttcgatttaaagtgttaatacttgcatatgctgtgtgcagactgcgccattggtgggcaatagcgcttttctctcaaggggcttttggctatgtgctgcccatcatttcattcatccttgcctggattgagacgtggttcctggatttcaaagtgttacctcaagaagcagaagaagaaaacagactcctgatagttcaggatgcttcagagagggcagcacttatacctggtggtctttctgatggtcagttttattcccctcctgaatccgaagcaggatctgaagaagctgaagaaaaacaggacagtgagaaaccacttttagaactatgagtactacttttgttaaatgtgaaaaaccctcacagaaagtcatcgaggcaaaaagaggcaggcagtggagtctccctgtcgacagtaaagttgaaatggtgacgtccactgctggctttattgaacagctaataaagatttatttattgtaatacctcacagacgttgcaccatatccatgcacatttagttgcctgcctgtggctggtaaggtaatgtcatgattcatcctctcttcagtgagactgagcctgatgtgttaacaaataggtgaagaaagtcttgtgctgtattcctaatcaaaagacttaatatattgaagtaacacttttttagtaagcaagatacctttttatttcaattcacagaatggaatttttttgtttcatgtctcagatttattttgtatttcttttttaacactctacatttcccttgttttttaactcatgcacatgtgctctttgtacagttttaaaaagtgtaataaaatctgacatgtcaatgtggctagttttatttttcttgttttgcattatgtgtatggcctgaagtgttggacttgcaaaaggggaagaaaggaattgcgaatacatgtaaaatgtcacgagacatttgtattatttttatcatgaaatcatgtttttctctgattgttctgaaatgttctaaatactcttattttgaatgcacaaaatgacttaaaccattcatatcatgtttcctttgcgttcagccaatttcaattaaaatgaactaaatt

SEQ ID NO: 167 - DNA, 451 bp, Homo sapiens
ccctctgtaatttacaagatttttcaaattggtggggagtgaataaatacaatttaaaagagtcagaaatcagtttggcaaagtgtactttcttaatttctatttatgatgaagtatagtcataatttatttgtaatactactttatggtataccagtgaaagaactgtagtataaaaaagaggtattaatgttttatgaaatctcatgcatcagttcatagcataaaatctagctggacaactaagaagctatggtagcaaacagtgatgttgatggaatgagaatcatgaactttcatattacctcaaaggatttttttatcagtttttttcacacatcagaaaaaactgactgtataaacacttatcactgacctttttctatgtgtagttttgccttttatcttttcccaaatttttataaagagaaattaataaatattttattac

SEQ ID NO: 168 - DNA, 913 bp, Homo sapiens
accatttaaaagcttacaaaaagcaggaacagtaattgaagatatcagtctatagagtaaccactatgtttattcattatttgttactctaatacttgcataagaacgtatatgtgcattcatgcgtgtatacatattggccatcattaccttttgtctgttgtgtataatacagattcttgttcttctgtgtcatcaccaacatgtaatattgtcagaatttttattttttgtcagtttattggttttaaaactcttatcttgtgttcactttgcattccttgcaggttgaggatgttttgttttctggtcttagtctcattcttccttctttttcctgttggtcttgttcttttctttttgatttgtagggtatataggatggtgcaaagtaatgaggtttttgcatcgttgaaattgtcattgatactggaatacctcttaaacttcttaaatgtggttatgttatacatcattttaatgggcatttctcactttgtttttttttttttgctaatgacttattacttgctgtttatatttattttagactatggaaatgatattagacaaaaaagcaacttcaagtggttttcttatttgagttcaaaatgggtcataacgcagcagagatacttgaaacatgaacagcgcatttggccccaggaactactaacgaacatacagggcagctgtgattcaagaagttttgcaaagcagactagagccttgaatatgaggaacacagtggccagccattggatgcttcacttcttgaagcatcttgacagctttttgcaggtgaaatgcttccacaccagcaggatgcagaaaaatgctttccaagagtttgttgaatccagaagcatggatgtttatgctgcaggaataaacaaatttatttctcgttggc

SEQ ID NO: 169 - DNA, 1072 bp, Homo sapiens
  misc_feature 929,1042: n=a,c,g, or t
attctgtgtcattccttcccgtctccttcatagaatactactttttccttttgtctcctggccattctccatcatctgctgattattgctaaccacaggatgctggcaaagcttacagtgataggcacatgtgttcagtgatgtccaatacactcttatcacagtggttattgcttcttactcttttcaaatgcattattctacccctcaacctacatccaatcattagaactatacctgactggagcccagaacttgggaccaatacttaattcaaatagcaggggcttgctcacaaacattaagcccaacaagaagcacagcactttgaaaagtcaaataggcctttggtagctctgtacatttgcaattttacatttgttattagtttatagcactaataacacttcagtcgtgaatctacagtctcaatatgataagtcttagaacatgttctagaaatagtggtaccttgctgctattatacttagtaacttataccccaatataataataagtattaaatacagattgtgtatgcattctttgtgtgtatatgccaactgtactacttaacctcactgatgagcaattagaaaaatacacaaattgtcatagtgaaaataagtcttggtcaattcagatgatacgtgaacctgataaatgctctaatagatatgctattttgtcctgtattgcctgtttcacagtatggtgcatgttgtttgctaagtaaaaatgataataataataaagtataccaattttaagggttagaattaaaattttgcacatatgcctcttgatattctgaaatgtattctgtggcttaattatcttattcatacacatttcacttggctttttacccctaggaaataattgtccaagtatatatctcgtcctctttcttgtaactttgaataaanctgcctacttcaacttacaacattgtaaagccagaatacctcattttaacagtgaaaaaaaatatgatgaccgatgtggtctcttggatttgattgaaccaccaaataggctnactgggaaaaaaaaaaacaatttggcaggc

SEQ ID NO: 170 - DNA, 1114 bp, Homo sapiens
cctttggcctttgctggctgtgtggcggctccgcggttcgcaggtcgttcgctgagcgtctctgcttagccgcggtcatgagccggcacagccggctgcagaggcaggttctgagcctgtaccgcgatctgctgcgcgccgtgcgtgggaagccgggcgccgaggcgcgagtgcgggcagagttccggcagcatgcgggcctgccgcggtccgacgtgctgcgcatcgagtacctgtaccgccgcgggcggcgccagctgcagctgctacgctcgggccacgccaccgccatgggcgccttcgtacgcccgcgggccccgaccggggagcctggcggcgtgggttcccagcctgacgacggcgacagtccaaggaacccccacgacagcacgggggcaccggagacccggcccgacggacggtgacaggcgaagagccgaactcgctcgatggcgtggtggagccaggaggctcgcctgactgcatggggggactggggaacccgcctaaggtgagaggtcttaagagactagcttgacgaattggggatgtcagagactcctccttggcgacgcagggggcctagagagccccgtgatggacggcaagggaggcccgccttttccgatgcttggagacaggtcggtgctcctcccccatgagggcttggggcggcctgggacgctggcgggctggacagtgtcaagccaagagctacttgcccgaaggtacggggagccaggacgacccccggtggacagggagagcctgagacgcccttctcttgacccctgagaacatacccacttctggctcctcaaggagtctcccctctcctgtatttaactctgagaagtgcagactttttgctgagaacgttttgggaaggtgccctgatgagcggtgagaagcccggaatccccttctggaaaactttcccccattaattgtgacaagccaggaccatgaggaaggggtaggggtctatcaccctggttgatcaactgaagacccccaaaggcccctacttgatggttttgaggggcaacattgattcattttccctttccctcttggaatttttgaaaaagggaataaaattggggatattttt

SEQ ID NO: 171 - DNA, 1111 bp, Homo sapiens
tttatttttaaatccaaggggccagaacaaatgagacacctacccttggaggacaaactcaagtggccaaggttgggggaggggatgacagcaaggggctgggcaggaacgcgtccaaacacagcagatggagaggacgacctcttcactccggcgcagcctccatcaaatacccattctccggagccaggtagccgtcgccgccctcagactccatgtacatgtctcggctgtcgttgcccagaccctccagcccgttgtcctggccaccgcccccacctcgggcctcatccctgccccgctcactgccccgctccccccgtttgtgctcgcggtcacggtcacggtcacgatcccggtcccggcgccgctcgcgctcgctccggtggctccgccgtcgctcccggtcacgatcccggcccttttcctctggaccgtcagggccgtcaggcccgagctcccctggaggcccatcatcagggggcgcgtcacccgcctcggagggctccgccatgtcgccaccgccgccacgcagctcctccttgcgctcccgctcccgccgggcccgctcccgactccggctgcttcgccgcttccggtcccggtccttgtccttgctccgctccctggagcgcctccgctcctccttgtcgcgactccgtgagcgccgccggtcccgggagcgggagcgtcgccgttctcgctccttgtctcgctcccggctccgctctctgcgctcccgctcacggtcccggtcccggtccctgtgcggaagcggggaggggccgggcctctcatcgtagcgggaggtgtcatcgcggcctgaatgccggatgttcacatcagcccctcctcttctggtaccaccgaggcctcctcctagccgccggggcctccagcccttcacggttcggcccctctccacgtccacaaggaccctcctgccatcaatcttcttgccatctgcgtgtttgtaagcggagtgcatgtctcgctcgtgttcgtactcgatgaaggcatagccacggggctttcctgaccgcttactgtagaccatgtgtattcttttgataggtccgtacacctcaaactctctccggagtctagacct

SEQ ID NO: 172 - DNA, 858 bp, Homo sapiens
cttttttttttttttttacacattataaaccagccagtttattattttgtagtaagatttagaacttttaccatgcagactgaaatatctgtgtcagcatgaacagtacattttcttcctagaggcagttacatggaaaaccaggttattatcaggttatttagcaagtatggaatccaaacaagaggagactaatcttaagacctataactcgtccatgaaggcttggggcacacttttctaccaccagaatgccttagcttccagaaagctgtggactcttccctctccgtcttggtctggctgagtaccgctactgctcagtcacttcctgcagccataccgtcaggccagcttggcctaaaagctgttatctctggtcactggtttgtgttgttacagccactgctactaacagttaaggttctgaagggggcatgtcaattgctcccaggtaccaactaggagacacaataatcctattagtttgttctcccaaacccactccagtttatcaggtaatatgctctgtaaggttctttccaaccccattagcacatacatagattacctataatttcacctaatgtaatctaccttcctactgaggattgaggttttaacgtttgttttttttccccccactttcttgatcagtgattctcaaccatgtaggaattaatgaaaccaattctgtatcaccactgcaaccaagacagcaataccaagtgatatgtatttttcaaactaatgtcattttgttctctatactgtaaaaaacgagaagatgcagtcctcaacttagaactcaatactaggaagggtcaagttgtcaaaaaatgattgaattctagacct

SEQ ID NO: 173 - DNA, 18 bp, Homo sapiens
cgattgaattctagacct

SEQ ID NO: 174 - DNA, 1146 bp, Homo sapiens
tggagcgatttagccaagaagttcagattacagaagcccgctgtttctatggcttccaaattgccatggaaaacatacattctgaaatgtatagtcttcttattgacacttacataaaagatcccaaagaaagggaatttctcttcaatgccattgaaacgatgccttgtgtcaagaagaaggcagactgggccttgcgctggattggggacaaagaggctacctatggtgaacgtgttgtagcctttgctgcagtggaaggcattttcttttccggttcttttgcgtcgatattctggctcaagaaacgaggactgatgcctggcctcacattttctaatgaacttattagcagagatgagggtttacactgtgattttgcttgcttgatgttcaaacacctggtacacaaaccatcggaggagagagtaagagaaataattatcaatgctgttcggatagaacaggagttcctcactgaggccttgcctgtgaagctcattgggatgaattgcactctaatgaagcaatacattgagtttgtggcagacagacttatgctggaactgggttttagcaaggttttcagagtagagaacccatttgactttatggagaatatttcactggaaggaaagactaacttctttgagaagagagtaggcgagtatcagaggatgggagtgatgtcaagtccaacagagaattcttttaccttggatgctgacttctaaatgaactgaagatgtgcccttacttggctgattttttttttccatctcataagaaaaatcagctgaagtgttaccaactagccacaccatgaattgtccgtaatgttcattaacagcatctttaaaactgtgtagctacctcacaaccagtcctgtctgtttatagtgctggtagtatcaccttttgccagaaggcctggctggctgtgacttaccatagcagtgacaatggcagtcttggctttaaagtgaggggtgaccctttagtgagcttagcacagcgggattaaacagtcctttaaccatcacagccagttaaaagatgcagcctcactgcttcaacgcagattttaatgtttacttaaatataaacctggcactttacaaacaaataaacattgtttgtactcac

SEQ ID NO: 175 - DNA, 496 bp, Homo sapiens
gtaagggctgaggatttttggtccgcacgctcctgctcctgactcaccgctgttcgctctcgccgaggaacaagtcggtcaggaagcccgcgcgcaacagccatggcttttaaggataccggaaaaacacccgtggagccggaggtggcaattcaccgaattcgaatcaccctaacaagccgcaacgtaaaatccttggaaaaggtgtgtgctgacttgataagaggcgcaaaagaaaagaatctcaaagtgaaaggaccagttcgaatgcctaccaagactttgagaatcactacaagaaaaactccttgtggtgaaggttctaagacgtgggatcgtttccagatgagaattcacaagcgactcattgacttgcacagtccttctgagattgttaagcagattacttccatcagtattgagccaggagttgaggtggaagtcaccattgcagatgcttaagtcaactattttaataaattgatgaccagttgtt

SEQ ID NO: 176 - DNA, 1297 bp, Homo sapiens
tgcctattgctgtgcttataaaatgaaaaaggaaattgaggacacttttgcaaatgccagaatgtaagattcattcagtgtgctccctgggcctttatggcatgggttgacaggatttgtttattttctaaaattagcttcattcaatatttatcatcctcctttccctctctgagaatgaactatgtataaaataagcttctgcctatttgcatttatcttccaaacccaatctagtaggatgttctcattttaaaaacgaggggaaaagaccagagtctttcaggagaaaactggaggaaaatgggcacaaaaactcagaaggcagctattcccagcagcttcctagttaacaacccccatgctgcctccagtctttgtctgtattcttctgtatttaaccttcagattgtaagccttttctggcaagcttttcttctttttttaaactcttttcctgaaactttttatgaatggctatggcaccattaatgctgctgaatatctttaaactctgcacaagcaagtgtgtagcttaaggccactactggtaaggaaaccaagtgtcctctgtgccttttttctttctgtgaagtaatttaagaatatccaaaaaaattagactttaaaaagttatcttggtacaacaccgtgtgtatatacacttggaagcttaaaaaggtgttttgtctggaacttagaagcagctctaaatctagtagagcagactttctaacatacctagttttgtgtattggctttgctggagtatgatagcaaaatgaagactcttttactcagctctggtattgctcataacttaccaagaggctaatactaaacttggaaaattgtttaagtatgttttatcaagcagtctgggttttgttttttaatatactttttaatggatatgtgaaaactgaaggaaatgttaaaggttttttaatggtgcaagtgaaggtgccagttgctatttgatatcacactctacaaaagcttcattactttatttgatggtggttgctaagcagccattgcacagagcataagtctactgggtgcctttacatgccagaggctgatgctgcactgttgatgtcatgtgaggaaataatgcacatgctctaactgctcaacaggaaatgaacctagaaacagaaaatgaaaaggttgattgaaataaaacttgatcaacgcgactgtattttgaaacattccaggaaggttacttcttgtcaaacttgcctggcagtgtttgttcaaaacttgtatttaataaatgaacatctgactt

SEQ ID NO: 177 - DNA, 1145 bp, Homo sapiens
ttttttttttttaccagaggaagcagcttttattgatgggttatctccagaaaccagaaagactatatgtactcactttcagttacccccgtgcctccagaatcgcatgttgctccacctgggggcggatataaattacctctagattgtccaaagcccagtctttcccttccctgtgcagccttagaaactaagtagcagtactgtttggtgtgtgtttgtttcttccccagcaatgcctactgcagctacttagtaacaactagaggtggagggtgtccggggaagcagttagatgagttaagtgtgatgcacaggaaaatagtatcgtagcctatcaaaggtccctctgccctgcctcagtggcttgattcttcattggttgcatttctctttgtgttggatgacgcccttctgaatcagatcagggatttccactgccagccatggacccagctgcaatacaaggaaaatcctgtgagattactaccagtcaatgcttcttgttccattagaagctccttcctggagacagattctgggggaacatgcttaagggacatcactgttattccttttattcttagctgcttttcttgtactgctcagggcctaagtccctctttctccttttatgccaaatacacaaaacttacccccagagccatgagatgagctagtccaaatttgggcacattcctggcccacaaaggtttgaaatgatccgtcaggcatattttgccacccctatgagagggacatgaagaaggtgttgacatgcaaagtttaccataaagcacagcagcctcttgggggcataggaagactactagtgatcagaattgagaacaagttcagctaagtactttgcttaggctcagcaaaggagggcctggcaccccactaggccagcagaccctgggaaaatctctgcctccaaagttcttcctttttttttttttccttacatcttttaagttcagaggtacacatgcaggatgtataggtttgttacataggtaaacgtgccatggtgatttacacatagatcatcccatcacccagacatcaagccaagcatccattagctattcttcctgatgctctccctcccgccacgaagttcttccattgaattctagact

SEQ ID NO: 178 - DNA, 2173 bp, Homo sapiens
cttcttcctgctcaacctcgccatctccgacttcctcgtcggcgccttctgcatcccactgtatgtaccctacgtgctgacaggccgctggaccttcggccggggcctctgcaagctgtggctggtagtggactacctgctgtgcacctcctctgccttcaacatcgtgctcatcagctacgaccgcttcctgtcggtcacccgagcggtctcataccgggcccagcagggtgacacgcggcgggcagtgcggaagatgctgctggtgtgggtgctggccttcctgctgtacggaccagccatcctgagctgggagtacctgtccgggggcagctccatccccgagggccactgctatgccgagttcttctacaactggtacttcctcatcacggcttccaccctggagttctttacgcccttcctcagcgtcaccttctttaacctcagcatctacctgaacatccagaggcgcacccgcctccggctggatggggctcgagaggcagccggccccgagccccctcccgaggcccagccctcaccacccccaccgcctggctgctggggctgctggcagaaggggcacggggaggccatgccgctgcacaggtatggggtgggtgaggcggccgtaggcgctgaggccggggaggcgaccctcgggggtggcggtgggggcggctccgtggcttcacccacctccagctccggcagctcctcgaggggcactgagaggccgcgctcactcaagaggggctccaagccgtcggcgtcctcggcctcactggagaagcgcatgaagatggtgtcccagagcttcacccagcgctttcggctgtctcgggacaggaaagtggccaagtcgctggccgtcatcgtgagcatctttgggctctgctgggccccatacacgctgctgatgatcatccgggccgcctgccatggccactgcgtccctgactactggtacgaaacctccttctggctcctgtgggccaactcggctgtcaaccctgtcctctaccctctgtgccaccacagcttccgccgggccttcaccaagctgctctgcccccagaagctcaaaatccagccccacagctccctggagcactgctggaagtgagtggcccaccagagcctccctcagccacgcctctctcagcccaggtctcctgggcatctggccctgctgccccctacccggctcgttcccccaggggtgagccccgccgtgtctgtggccctctcttaatgccacggcagccaccctgccatggaggcgccttcctgggttggccagagggcccctcactggctggactggaggctgggtggccggccctgccccccacattctggctccaccgggagggacagtctggaggtcccagacatgctgcccaccccctgctggtgcccacccttcgcagttactggttggtgttcttcccaaagcaagcacctgggtgtgctccaggcttcctgccctagcagtttgcctctgcacgtgcacacacctgcacacccctgcacacacctgcacaccgtccctctccccggacaagcccaggacactgcctttgctgccttctgtctcttgcataagcctcaggcctggccctttcacccctcttcccaccaactctctctgcccccaaaagtgtcaaggggccctaggaacctcgaagctgttctctgcttttccattctgggtgttttcagaaagatgaagaagaaaacatgtctgtgaacttgatgttcctgggatgtttaatcaagagagacaaaattgctgaggagctcagggctggattggcaggtgtgggctcccacgccctcctccctccgttaaggcttccggctgagctgtgccagctgcttctgcccaccccgcctctgggctcacaccagccctggtggccaagcctgccccggccactctgtttgctcacccaggacctctgggggttgttgggaggagggggcccggctgggcccgagggtcccaaggcgtgcaggggcggtccagaggaggtgcccgggcaggggccgcttcgccatgtgctgtgcacccgtgccacgcgctctgcatgctcctctgcctgtgcccgctgcgctgccctgcaaaccgtgaggtcacaataaagtgtatttttttattggtgct

SEQ ID NO: 179 - DNA, 2996 bp, Homo sapiens
aagacgagacgctgcgactgttcctgcagcagagcggcccggacgcctcattccccctctgggccctgggctccatgagcaagaggctgcaggctgcttctgagatccagcctgggaactgtccaggctcctctgtcctgcctgggatggaggggccactcatcaaaccctctactccccggctgccacccacactggacagagaccaccactacctgggtcttgacgcaggtggcaccacttcttgcccaaatgccgtggcctgggcccaggccccccaagcactgggtccccggcatgtggacaaggccactcaccacatctgtggctggctggaggctgccctgggcccttcctgtgaccctcagccttggaggtcagggtgccctcacacctggggatctgtgctcagccacccgatgcccgctgctccttgcttttggaggtcatccccctcccccccagtctctgcaatgtccccctgccaccctgtccaggctatgcccttcttgggctcctcctgccccatgcctgaggcacgtcccttttcgtggtttacatgacaggccagtaacaggaagggcctggggagagtttctgggctgagccacatgtgattttcctgatgggcagcactgggccacagctggggctctggttggctgtgacctcccccagggcctggctgcatcttgggtccctgtggacagagctgtgtaggctgcagatgagagttctgttctttttgggaaggagcgtgtctggccaggttctgcctttagtttgtggtgtgacctttagcagttcactcagcctgtctgggctcttggtggaaacaggtctctgaggttccttttcggccatgcttatggctccaggtcatccagcgccacagggcaggggtcctcactgagggggcgtgagccaacagccgacggctgagggcgggccgggtggagctgagttctgctgccttgcagtcgctgcgggtggagagttgcctccccactctgagcccgtgtcctcagtagtaaaatgggcagcataaggccctcctcacaggattctggcatcaagtgagatcttcagtgtaaatgaccatgtataaactgtaaagtgcaatagaaaactgtgtgtgtgaggaaagtaaggcctagagggggtgatgtgtggcacatgacaggggagatcccacagctgcagcacggggacaggccgcttccccacatccgctcatgccactgtaagcagccctagctcttgggtccaggacctcaccaggtcctcgtcagactcctgtgctcttccaggggctgctcagccccacctgaagagcccagagaggctgtcttcctacccagcaggtctcatgcaggcccagggctggggatgcaggcaagaggagggagatggccgccctgtccctctccctagctggcggctctattctgagcagttcttgctgcccgtttgctctcaggggaaaggctcacgccccccatcttagccccaggggggtaagtgggtgctggtgatgggatggtgtggcgctcctgccgtgggtgttgccaggaggctctttgggaaggagtgtcgcccggtcaggtggtgcgctcccggtcactaggggtgtacacgtgaagttgggtgaacacctgctgctcatggtacccagtgattcttgcccgagtgggcagctgagcagaggcccctctgggtcttgcagtccaaagaaccgcagagtagcccaagggctgtgggtccattttgagtggcagccaagtctgggagcccgtgtgcatcatgtttgggtcaggttggcgtggccaccactgaaataagcaataagtacgggctcctggtacctgcggatctcctgcaaacaggcccagagaacagccttgaagccacctttcccctcaaggggactgaccctgtctttaatgctgcagtggcatccagggatcagtggaacattgctttgagaaccctcctgctgttacggaggcagcacaaagctggtgacccctgagccaacacggcactgggatggctttctaggacagaaccctgtcggcgactgtcacatctcaaactaatagctgattttaaaagccagcagcagcgacgccatgtacctgagtacaggtggcagttgcagagccgtgggctgtagaaggtcagatggggcttcccacaggggaaatctgggcgtgctgtagctcagggtgactcccagctccgtcactagcagggcgacccccttccttctggagccttagctctgaaagcccccagtgggggtgccctttcagatgccccctttccatttcaaaggctctgactcttgatcttgaagccggacgcggcactggcactcggcttcagtttccactgtgacagatggaggtctcctttcgccccagcccaggtggccaagcccatcctggcctcagaacatgctgagcacattttgtagggtggcacctttttatccaagttactagctacacatcagtgtttaaagagaaaaaagtgacctttcattttttttttcttgaaacttgaggaaacaagatacatactactgattttttttttttcttaaaactaaatgcatgactgcagagcggtagaggtgtatatttttcatactgtggggcaaagtatttgtgctgctttttggagatggactggaacgtctggtttctgtccccgggcccggcagctacgtctattttctgtagaaggtgccacagtgagacctggagccaccccttcctgccctggcgccgtttagagctgggagcccgtggactcccggcctgtttctaccttctattcaaccactctgacgtggggagacaagaagaaatagaactttttgatagtgtggtaaaaacattgatttgaactattttagtaaaaggagtaacaaacaagattgtgatagtgtctactttgagctagataaataaaggcctctttgtgagcct

SEQ ID NO: 180 - DNA, 1317 bp, Homo sapiens
gaggtgaacttggcctcctgccagctagatcctgctgggctgcgcacactcctgcctgtcttcctgcgtgcccggaagctgggcttgcaactcaacagcctgggccctgaggcctgcaaggacctccgagacctgttgctgcatgaccagtgccaaattaccacactgcggctgtccaacaacccgctgacggaggcaggtgttgccgtgctaatggaggggctggcaggaaacacctcagtgacgcacctgtccctgctgcacacgggccttggggacgaaggcctggagctgctggctgcccagctggaccgcaaccggcagctgcaggagctgaacgtggcgtacaacggtgctggtgacacagcggccctggccctggccagagctgcccgggagcacccttccctggaactgctacacctctacttcaatgagctgagctcagagggccgccaggtcttgcgagacttggggggtgctgctgaaggtggtgcccgggtggtggtgtcactgacagaggggacggcggtgtcagaatactggtcagtgatcctcagtgaagtccagcggaacctcaatagctgggatcgggcccgggttcagcgacaccttgagctcctactgcgggatctggaagatagccggggtgccacccttaatccttggcgcaaggcccagctgctgcgagtggagggcgaggtcagggccctcctggagcagctgggaagctctggaagctgagacactggcggcaggcacctagctatgtgaccactggccctaaaccttttccctctgtggcctcctggcttgcactgctccctctagaaagattccttcaggtctggaggcagaggaatgggcatagctgagccagttgccctcctagggcatgtttgaccaggactgagtctggaatctccaagttaaagatggtgaatcaatgcttcgggcttggagatggaacatgcctcctctccattcagctagaaggaccaaagcatgtggcatttggatggccagagtgccctgaagcaccactaccaaccttgcctccccctcctctcaaagagcctctgattgtgtcaccaaggggctcacatcttatgtctgccatgccaggggtgtcgccatccagatgtgttggaagcttcccctcctgccttatgctcacctgtggacaccgaggatgccctcacattggtgctttctcctcatcctcatgccccctttgccacaatggtatgatggcttggtagcccctcgaggcagatgcacctgacttgctgctattaaaaagccgtgtgccttctt

SEQ ID NO: 181 - DNA, 791 bp, Homo sapiens
caattaggcacttccaaggctttagtagagagagccactttagccctttgtgccatgtttgaaatttgcccttgtattaaatccttgattttttcccatttggctttgatgcccttgatccattgtttccttcctactataatgtgcttcatctgtgacactttctcttgaactctgattggattcactgtgcatgcttcagtgggatctgctccacctttcagtgacatttaagacatcatattcccgtaacattatgtctcagtctgatcgtctttaccagtatgaaagtcattcatttagtgctaccaaaggggatacacaagccctttaggaagcagtacctctcgcctggaggatctgtgccatcttggattgagaattgcagatgtgacagaatggattgaccctagttggttggtattgatgacttcagcctggaaattgcttgccttttaaagaagcatatatgggttggaattatgccaaagcataggaagctgggaataagcaaacaaatgctgatatagtcagcaaatttggatagtctctagggctcatcatttttcatactacctctctcttctggcctgtgtctaaggaattgtacaacataggccagggccaacaaagtggagaggtggacacattttcatgttcattactaaaacaaacagcaaaactattggtttgttattctgtgttttcctcaagtcagtacatactatttggtttcaggatttctttccatttctctatcaagcattaaataattgagaactgtttcttca

SEQ ID NO: 182 - DNA, 1226 bp, Homo sapiens
atttgggttcatataacttttgatatttttctgcatgtgctcataaatgagtactctgtttacatgtgtatttctaagtggtatcattttggccttctcttttacagcatgcccagggattgtctatttccctcctctcaacaaaccatcatggatgtctaattactcatgatctgatttagaagtcaccacatctgtgtcccaccagcctgtcggtgccatgactgtggtggtgaagcatgtggttatactcagtcttacactggaagatcattcttgatttagatccctacagctgcctgctgactgagtgactttggccaagttacttgactattgtagtagcattgtttccttacctacaaaatgaaaattatagtttctataatgctgtcttgaggattgaacgagatgatatgcataaagcacttgacagagtacttggcatcctcctggttcccaagcccaccagtggcatttccattcctcccagtgctcagcccaaatgtgttgggttttgttttgtttttgagatgagatctcacttcatcctccagggtggagtgtagtggcatgatcatagctcacagctcactgtagtgtggaactcctggactcaagtgatcctctgaccttcctcaccacatctattgctggcataggtctaaccaccttcatcttttacctaggttattacctggtcttgcttccttttagtgggcttttagtacatttctcttcttccacctcatatggcattaaagccagtgtcctcatatggtgacctacgaggtcctcccagacctcatgccctgtactcccttgatgatcaacaaacaccgacacacacaagcctctggaattttctcccacagataacctccttgttgacccatcatacagaggtagaccttctctgaccaacttagcccccaattctaacctcccttcccccagtgagactctcacttagttttaccctttagcacttatctaacatgctctatattttacttatttctttacctgtgtattgtctgcctctttcactagaacacaggcaccacaagccaggatgtttgtccattctgttcactgctgtattccgcatgtttagaatagcacatgtatattcattgtgtgaattttaatagacactaaaatttattaagtgttgcacatgctagttactgtgcctagaattcaataaatgttagtgactgctt

SEQ ID NO: 183 - DNA, 1342 bp, Homo sapiens
aatagtcactcgtaaaaactgtcagtgcttgaaactgtttcctttactcatgttgaagggactttgttggcttttagagtgttggtcatgactccaagagcagagcagggaagagcccaagcatagacttggtgccgtggtgaaggctgcagtccagttttgtgatgctgcttttacgtgtccctcgataacagtcagctagacacactcaggaggactactgaggctctgcgaccttcaggagctgagcctgcctctctcctttagatgacagaccttcatctgggaacgtgctgagccagcaccctcagatgatttccctccaaactgctgactaggtcatcctctgtctggtagagacattcacatctttgcttttattctgtgctctctgtacttttgaccaaaaattgaccaaagtaagaaaatgcaagttctaaaaatagactaaggatgcctttgcagaacaccaaagcatcccaaggaactggtagggaagtggcgcctgtctcctggagtggaagaggcctgctccctggctctgggtctgctgggggcacagtaaatcagtcttggcacccacatccagggcagagaggtctgtggttctcagcatcagaaggcagcgcagcccctctcctcttcaggctacagggttgtcacctgctgagtcctcaggttgtttggcctctctggtccatcttgggcattaggttctccagcagagctctggccagctgcctcttctttaactgggaacacaggctctcacaagatcagaacccccactcacccccaagatcttatctagcaagcctgtagtattcagtttctgttgtaggaagagagcgaggcatccctgaattccacgcatctgctggaaacgagccgtgtcagatcgcacatccctgcgcccccatgcccccatgcccctctgagtcacacaggacagaggaggcagagcttctgcccactgttatcttcactttctttgtccagtcttttgtttttaataagcagtgaccctccctactcttctttttaatgatttttgtagttgatttgtctgaactgtggctactgtgcattccttgaataatcacttgtaaaaattgtcagtgcttgaagctgtttcctttactcacattgaagggacttcgttggttttttggagtcttggttgtgactccaagagcagagtgaggaagacccccaagcatagactcgggtactgtgatgatggctgcagtccagttttatgattctgcttttatgtgtcccttgataacagtgacttaacaatatacattcctcataaataaaaaaaaaacaagaatcttga

SEQ ID NO: 184 - DNA, 2633 bp, Homo sapiens
tgaataattgccatgttaagttaatgcaaaagatcagaacagggctacatttgcacaggcagtttctctccgggccgtagttttcactgatgatcacctttcacagcattttccccaaccagcatttcacttagtcttctctatacccagcacctcccccggcacccccggcaagcccactatcacttccgacttccaacgtggcatccgtgagatctgtccacattaggcgaagcaggagaacactgagagcagcaggatgggtttggaaagagcatgcctctggaaacacagcttcctgggaattcacatgaggccagtcctacagagagcaagatgcaccccaggatttcttcattttctaatagatgtgggagtgctccattttccccgacagcgaatttcccctgagaaacgatactagaccctgggtttgcccaccttgtaactcttccttatctcctccttttcatccctaattcatcctccctctggcatggaattgacgcccgtgcagtacatttgccaagtggcaccttctttcaatttatgttttattttgctatggtggtgattctttatttgctggttgtcttttctcacacatctttctctctgtctctctctttcctgctctttgtttttctgcccagaaaaacctgacttcgataccaaaaaagatgaaactacagaaactcaaatttaaaaaaaactttaaaagaaacaaaaaaatactcaacgatctttcagctttattaacattttccattgtttcttgcgacttgtgtctcgttctttgtagtattgatgatgaacatttgataatgaatgttcttgtatattcagataaagaaaaaaaaaaaccaaaaaagcggtctgaatttaatagtgtttataataaaaattttaaaaatgaccctcatagcacgcaaaacaggatggggaatttcccctcttctttctgtgacaatgcgcatcattcctgcattagtttttaacaccagactacctacattcatcatttccctcatttttcttttattttcttgcatttgtgaattagttcaagaatgctagaaaagtgtcgagttgtgcacatccatttcttgtttcacaatgtttaaaagtgacagtaattcattttgtaaactaaaaaaaaaaaaaaaaaaggttggaatagtgagcataataggtacaacctaacacattattatgtttattaactttgagacccagaaataaattcttttcttttcttgattcctgctcttaaaaatacaaaaaaaaaaatgttttgttttgtgttatttttggtttgtttattggggggcttttttttaattgcaggattatgatcttgctgtttttcttcaatatgtatacaaggtgatgtgaaaagatgacttgggcagaggagtaagaacaagtaggcttgttcttctactttgcttcagaattcagttaatgccaaaagcgaagatcaagcccatgttgatgtctcgttgctcacctgcatttccagagagtgtgacactcatgcagtccctgagaaaaataaaatcagggacatacttctccttttagccttttaaaaattcaaaaacgtttagtccaagggaactttttatgctatcaggaaaggtttttgctgtttttgattctgattatcacagccaagtactttgttttatttctccctaattaataactacattccatgaggcctcttccaaccaaagaggccttttcttccaggagagtcccgcaggagatgctggtatgatgggcaccattggttaagtaaactacatgcaggaagaagtccttggggccagtctgccagctgagtcctggttttggatgaagagttaatgagatattgggccaggctcaatgctgtagttttaatgctaagaggttacgtttacttcacagagtacacctcttagtaacctctgacttaggcagctgcttaaagcaaattgcaaaactggcttgatttggaatgtttttattagaggaaaaaagaaagccatattatctggaaaaaaattcattttaaataccatcattcaacaaattatgttcagaaagtggtcagaacttaagcaagaaaagtaaagaaagaatgcagaattgtggagcaatgctttaggaaatatttctacctgaacacttgtactcttgaagtcacaacaaaataatgatgagcttttcacatcacctttatggtttcaatccctagctcaaagcttcctggaatcttttattttttgtaaacttttttttcttttgttaaaataaataaaacattcaatgtttttctccttttctctcttattacttctttcctttggcattttcaatttgaaatgctttcctttggttgttggttttattctccccctacccctccccttttcttattattcagaatataaacctgcaaagctctgctctgttttggttttgaaagtttaagcttttctgcttctgtgagagcacaggcttctgtcccttttgattccaactgaacttttgtgttctctaatgatactaacacggtgtaggttttacagtctcctaatttgtactggtaatgcatattccaaataaatagtttcttttgttgc

SEQ ID NO: 185 - DNA, 761 bp, Homo sapiens
caattacacactgattgctttgtgtctctaaaagtgagaggctggtagcttttccacattctcatggctattttctagttctacttgaatttataactgtttccctttttccttgacagctgccactttgtagctatttttctgtctctgctaatactttaccatatctatctcaattgttttttcttttgacttgctgaaaaatagaaaccagatgggaagtatattagcattatgattgaaataagggtaaatgagcaatgtgtgaaggttttcactgacttcacctaaaagatagtttagctacttgaattttagtaaatagaatttttcctttatttcatcggtccccccacctttttttttttttgcacctgccttgtaaatttaatagttaagtgacctctgcctagaggatgatatttggggaggtttgatgtttcctgtgggataagacgattcacaggtgagagtggggccacattagctgttattgtttccatgggtcagtgtggaaaatgcattaatcatattctaaacgttcatggacctcattacagtcacaattgtctattctgtttcctaccctgaacacattaaaatggtaggaactaatgcttgtcttatttaattactaaaagccaccattttctttgatagattgagctacagattgtaaacttcatgtatttctttataagtcaacccttttcaaagatatgcacatcaaactgaatgaataaataaatattgagaagttt

SEQ ID NO: 186 - DNA, 1127 bp, Homo sapiens
tgacagtttgttaataactaagtactgttaattgaactacttattattgttccctatagatataaagcagttcagaaaagattttgcttgcatgtagcttctggtagtacactgtgaatgcactaattatgaagctcaggtttatagaaccaagatgaattcctgagcttggagtaaaggttgtagaatcttgcttagcacacgatctcaggacatatctatacttggatttatatgacacaagaaactgaatgatgtcggcttcttgaaaggtatgcggctcataaaaagcaaccagcaggaaatcagaaacaggaaggatgatgctttgttggaaacaatttttcattctgagtacaattatactccatggacaagaaagctactacatcctgtcattaaatatcacaacctagaagcctctaatgaactgattagcattcatgtatctcttggaagtcagatatatgaacagttggtgcactttgctattgacaaagcttataatcataaatattctttgctgagattagattgcactcgtttgcttttcatcttagttagacatactagtttcgaagtaattaaattcattcattgcgagtctttgtttacattaattaggactgacatgtcagattttgcatattaaatgcatttatacagatcttattaaaatggcaaattgtgagcttcttagatgttaaaaaattgaagaatttggaagctaaaatgcacaatgaataaaatatacttaaagtttgttattaaccacttaaactttgttcatgtttttcattgaaatgcttattcatcgaggtacatatcaaatgtttggttcattcaccaattctggaagaatatgtgtatttttaaatttgttaacaatgtatcttacaagtacgtataattataatttagtgaactgttaaatcaattaattgaattgttttaaattattaagatacaattttattgtaatgtgaaattttactaatagcactcgatgatagtatgttgtatttttattctttctgtgtatgcttactctttacatatactgcttaatattaaaaaattgaatttagtgcatcctttaaaaaggatgcactattatttcaaatatc

SEQ ID NO: 187 - DNA, 1347 bp, Homo sapiens
gtataaaaaaataaaaagaaactgaccaggcgaggctgggtgcggtggctcacacctgtaatcctagcactttggaaggccggggtgggagggtctcttgagcccaggagtttgagaccagcctgggcaacatagtgaaatcccatactacaaaaaattagctggttgtagtggtgcacacctgtagtcccagctactcgggaggctgaagcaagaggaccgcttcagccggggaagtcaaggctgcagtgagccaagatcatgccactgcacttcagcctgagcaacaagagtgagaccctgtgccaaaaaaacccctcaaaaaaccatgttgggagggctgatcagattaggggaggaaggtcatttgtgcaggaaaaaaagcagttctaagcctcactggtttccagtggtggccagatttgaactcagcttgcctttggccctgaccccagctcaacccatgggtggtgggtcagagggagggcctctgtccccaggcagtgcttttgggggttcctccagcttctagtcctttcttgcggcccctgttttgttcttctctagcagttgcccgccatgttgggcccagggccagtcctgtgggtctgtttgcacactcaggacacagacttggatgtttgtggagctcctggttcacagggggctctggacttgaccaggggagtccctgaggctgtgcagccctttggggtctcacgccttccccccgccccattcccccagtgagcagcggttccatcgcagtgaacgccgactcttcggtgcagttgttggccgaagaggccgtgacgctggacatgttggacctgggggcagccaaggcaaacttggagaaggcccaggcggagctggtggggacagctgacgaggccacgcgggcagagatccagatccgaatcgaggccaacgaggccctggtgaaggccctggagtaggcggtgcgtacccggtgtcccgaggcccggccaggggctgggcagggatgccaggtgggcccagccagctcctggggtcccggccacctggggaagccgcgcctgccaaggaggccaccagagggcagtgcaggcttctgcctgggccccaggccctgcctgtgttgaaagctctggggactgggccagggaagctcctcctcagctttgagctgtggctgccacccatggggctctccttccgcctctcaagatccccccagcctgacgggccgcttaccatcccctctgccctgcagagccagccgccaaggttgacctcagcttcggagccacctctggatgaactgcccccagcccccgccccattaaagacccggaagccttt

SEQ ID NO: 188 - DNA, 1666 bp, Homo sapiens
aagtgctttgaagagaagagcaggcctcagacaccttttaattgcttaggagaaaccattgtctctgactgcaggtttgaataagttgaagaccagagaaaagtacacactgggctacaaaggaatttggagatagccaaggaacaggatttcccctagcaagctaccttctgttcaaatcatgaaaaaagactatttccccttagaatagggaagcttgctattttaaagctcttgtagtgcttttcttttaagggagatgtagtaaaagggaaaatgtagctcttagtttacacttcaaagatgtgggggtctttcagagaactaagaataacagttttatgtgcagagagagtttgccagatctgaagcatatacctcattgactaggctgttactttgggataggttgcagtaccagccacagccagcagatagaggaaaagacacacataaactcgcttctgagcgtccacttctgcactctctgctctgctgttactcagcccctgagtctgactcatctctgcacaacctctctgtgccatgaagataagtcttccatggccaaatcggtcatccgcactgcccttgggacttccgaagtgaaccattccaccagaacctttgattctgcacaagatttccttgctctgggaacaacccccaaatgcccttgggaggaacaacatgagctcaggaagcctctctttcttcacttaccattactaactctccaagcatagaaatccctgggaattgcgagaataactcccactattttaaaatttatattcagatttgtttcgtttcataagacacatcaaacaggcctatacaaaaggtttaggaaaagaaaacaatggtgagtcccggccctcttcgaattcactggcacctcatgcaagtgtaggaaggcacgctggatcgtctatctgattccaaagctgtcctttgccatctcatcccttggcctgccccccaaccctgaggatgcccctgccatccccccaacctcctcatattgcctctgaacccagatggcaatccatcccggttctctctgagggccacgggcttgggtagtggaaagggtgtttgggaaattgttaaatcagttacccgtagtagagctatttcttgtacttctaagttttctagaagtggaaggattgtagtcatcctgaaaatgggtttacttcaaaatccctcagccttgttcttcacgactgtctatactgagagtgtcatgtttccacaaagggctgacacctgagcctggattttcactcatccctgagaagccctttccagtagggtgggcaattcccaacttccttgccacaagcttcccaggctttctcccctggaaaactccagcttgagtcccagatacactcatgggctgccctgggcagccagcattcattgtaagttccctctttgaaaactggtgtgtgggtgttcagttctgtgtctggtgggtatggacagacagtaatctcctgtgatctgtgctagctgtgaggcagctctggaacgtgaagagctgtttggtttgaaccgtgaacaaaactgtgttttgagtttagctgacattaaagaaaaaagttcatcacgtgactgttaatgtaaacctggttattaaaataactatgaaattacc

SEQ ID NO: 189 - DNA, 1242 bp, Homo sapiens
aggggactgaagggtttggacggatcgaacgcatccgtcaaaaacggaaaggagaatattgcagttcaagacaggtctcaggccaggtttcccagaaaacagaacctgaggccaaactaaagggctactggatctgaggagctgcgattccagggtggagagaagaaggagaagggaggagaggcagggagagagggaaagccagtccaagatggtgcagggctgtgctgccgctgtttcacagagaacagggcacaggacctcgctgcactttgccacacggagggacagagccggtgcctcgggacagtcccctggagccaggaggagagaggaagtgtggtgtgcactccccctctcctgtctcacactggtagagtatgtcccatggaccatagcttccacatgctaagctgtgctactggtcccctcctggcagctgctgcaagtatcaggtcctgtgtccaggacttcctcagggtcaggaagtggcagttggagccagcactgccccaggacaggaaggtgatgcacacgcccaccctggcggaggccaaggaaggggcagggcctacagaagagcagtggcagctgtcgtggtggccaagatcaggctgttccatgagcaacgaccagggcccaggacactgggaggccaggggaatttgagaagttggctacgtagtcccagatccaaaatgcaatgtgattctggcaggtctcgctcatctatgcatttttaaatcttcccggctctatgagtaactcgatggttaatattgtttgactggataaatttctaacaaaaacaaattttatcattggagaggaaagtcagaactcaatctcaagtccactaacaggactgtgtaaccattttcatgtatatcatgatttactatagcactaactatggacctgtctcttatgggtgttacaaatatcaacttgtttaacaaccatcgcaagagccagcccgtgtggtcccattccggctgcaaagcccattgccccaccctgctatgctgtctctttgtttgttgaacttttcgctgatggaacatttgtatcatcttagctttccgtgggaaaaagaagtgcatgcctcatggtgggcccccatttccacctgagacaaaggcgttctgatcacgtttctctcctcttgccattaaccagggaccagagaatttgttttgtctcagaccttgaaactttaagatcaattaaagctagtttggt

SEQ ID NO: 190 - DNA, 1956 bp, Homo sapiens
ttaatgtagtagggtttatatagatatactaatataattgcatttggagaattagagtatgtatggagcccacacatactgtgatataaagtgtatatacagatatttggatattttctagtttgcatgatgattaagagaaccagatgggaaaatacaatctccaaagtgatgtttatcctggaattacccaatttagattagagaggttgttcaaatttaactagataactctagtttgtactgtataggtgcagttatgacagtaaaaaaatagcctcttggctcatacctgtaatcccaccactttgggaggccaaggtgggaggattgcttgagcccaggaattcaagactagcctgggcaacataatacagggagaccccgtttctattaaaaatacaaaaatcagccagctgtggtgacacatgcctatagtcccagctacttaggaagctgagaagggaggatcacttgaggctgtagtgcactataattatgcctgtgaatagccactctactccagcctgggcaacatagcaagaccccatctctaaaaattaaaaaaaaaatttaaattagaatatcatttctagcatcttaggtaggtacttatatctggcttacagaagtctaaggtattccttatttttatatctgctgtccacatttatacagctacataaaaattttatgacaacttcaacatgaaccttatattttcgacaatgccttgccaaggaatctctgaagtccatagcaggtcactgtgagacctagttccctgttgtcactgacctatgtaatcaaagacagtaatacagcctgggaaacatagcgagaccctgtctctatcaaaaatttaaaattacccaggcatggtgacgcacacctgtagtctaagtgtccaagttacttgtgaagctgaggtgggaggatcacttgagcccaagagtttgaagctatggtgagctatgattgttccactatactccagcattggcaacagagcaagaactcatctctaaaaagtaaaaagcaactccccagaaagactgtatttctacagataaatattgcattgagatgccaaatagagtgttgttgtaaagtcatcagactagaaagcagacctggggacagtgtttaccacctaagaggcagtcctgtttttgagacccacatctatatatagagatttttgtttgtttgtttgtttgttttgttttgttttgagatgaagtctcactctgtcacccaggctggagtgcagtggcgcggtcttggctcactgcaacctccgcctcccgggttcgagcaattctcctgcctcagcctcctgagtagctgggattgcaggtgcgcactgccacgcctgactggtttttgtatttctagtggagatggggtttcactatgttggccaggctggtcttgaactcctcacctcgggtgatccgcccatctcggcctcccaaagtgctgggattacaggcgtgagccaccacgcccggccagagatccacatctatatttataacacatttatggatgaaaattaaacaggtgtccgggtgcggttactcatgcctgtaatccgagcacttgtggaggccgaggcgggcggattacttgaggtcaggacttcgaaaccagcctggccaacatggtgaaatcccatctctactggaaatacaaaattagccaggtgtggtgtcacgcacctgtagtcccagttacttgaacctgggaggcagaggttgcagtgagccgagattgcaacactgccactccagcctgggtgacagagcaagagaccctgtctcaaaaaaaaaaaaaaaaaattaaatgggtagtgacgttaagagatatatatcagcttctagtaaaagtttttttttttaaacctgctagctacatttacattatgtaaaaataaagggaataatcactgtg

SEQ ID NO: 191 - DNA, 1799 bp, Homo sapiens
tattcttaagcgtttaacgtatctcattgtactgtgcactccacctgccctagcccatatcacatataagcagaactaagtccttttaattttcttaacatagtacattctctcgtgccactgtgattttccaagatgatggtctctctttctggaaaaccctttgcctctttatcttcttgggtaattcatatctgttgttattaactcagtgcagctgtcattccttttggaagccttccctttcttcatggtctgcaccctgtaccagacatgacacttactaaaatttattgctgtggttcttaaccagggatgatttgccccttagaggacatttggcaatggaaggagccacttttggttgccataactggtgtgggtgggtattgatgctactcttgtctggtgggtagaggccagagatgcctttaaatgttctacagtatacaggagaggctcccacagaaaagaattatatggcccacaatgtcaatagggctgacgttgagactgtttactgtatgtctgtcttcctagattcatgagccctttgacacctatattccctatgtgcagacagtctgggacatagtaggtgttcaataaatggttgttgaatgaataaatatttcttctaatgccacaatttctatgttgttgtttatttccttattatttccatgtgtgtgaaaggaccaaagacctttgctttttgttccttgatctctccaagaagggactttgtctaaacccaatcagcccagaaaaggttgactactggttatgggcctagtgaaatgactttgcccaggaaggtgaccaccagttctatgcctagggtttctctggaagatttggttttgtctgtcttcttccctctgagcctaagtgtctgtgtttccatcctcagggtatgttaacttctcaatggaaatttaaaaattccatactttcatttcaatggaaatgagaaacaaattaaaacaagaatgttccagatcctttggctggctacttatggattatgtttatgttggtgtttatgatcgtatttgcaccagaggacagccaaatgacatcctcaactgctaatgaacagagtcatgttgattaaacagaaaacagaattgggggaactccaaactcaaatgcctgcacgctggcggtcagtacattagcatcacctgcaagcatttcacaggcctgtctttggtcagacctgattgcaacaattattggcagtaaatacacaccaaacaactttttttttccgtctaattctagaaataagtgggttaagatagccattcaaactggatttcaggagcaccacaatacaatctttccttaaacaaggaagaccactgcagagaactaccaagtcgtagacacctcactaccccagacatcagagaatgcttcgctgagagggtggtggctaagtgtgaggcatgattaccttaaagttaatattattttgtaaaacagttctatgtgaatagagaatctatgtcattaatatcaaggttgaacactaaaacaggtgaaataaaaaaaaaatccacttgtttgaggttgtttctttgtcctgtttcaccccaaatgaaaatgaacactatctctcacactcagttacattttaaatttgggcttgttagttttttagtttaatgtatcttacatttgcaaatgtggtttttgtacttgtataagacatatgcataaggaattgaagtctattgttatacttgtatatattaaaataacattaaagtaagtatactttagatcaacct

SEQ ID NO: 192 - DNA, 1298 bp, Homo sapiens
aatactatttttgtttttaagatgtagccttgctctgtcacccaagctggagtacggtggtgcgatctcagctcactgcaacctctgcctcctgggttcaagtgattctcctacctcggcctcctgagtagctgggattacaggcatctgccaccaagcccagctaatttttgtatttttaatagagttggagtttcaccacgttggccaggctggtcttgaaatcctgacctcaagtgatccacccacctcggcctcccaaagtgctgggattacaggtgtgagccattgcacccagccaaaaatactatttttttaagagcctttaggattttgtgatagtagataattgaatgtgaatatgctcattgtgcaaaattccaaaaatatgtacagaaatagttaagaagtggaagattcttactcttctccctcccatcacctagatagagctattcttaatactgacacacatttattctagaaaatttggaaaatacaaaatcccataaaaaataaaaatcacacataatccgcccagccatagatataaacaagtgggtttttttttttccaatgaatatttttctgagcgtacaccagcccttaaataacctgtggttacctttaagaaaaacgaaaccaatggaattgtataatgcattaaaaccattagaaccaatttaccttcatggaaggggtcaaatatcccgggtgaggattgaaagagaaagaccgattccggtgggacatggcactggggaatgctgcgtagtgaaatcttctctcttcctagaaaaccaatacaactgagtctaaatgagcctaaccacacagcactgggtttgacttgaaggaagatggctgtgagggcagaatagagaaggaaagtccaggggaggaaggggaagtcagtgggaataaagctgccaggcactgaagcttttgaggaagcacctttgctttttttatgtccccagcccctcttgtaaagaaaagggcaagctgatgccttaggaaattgaaaattcaactgttcttagcatgtgaaggtaacctaatgcagaaagttagtaattaaggcaaagaaagaaaacccccaggtatgcaaaggattttgccgcctttcttcctctgtcttgtttgacatttgtgttgcctaacatatacaaacatagggagagtaatgaaatccatccccactttacctataataactatatggccgatcttgtttgtgtgtatcattttccacttttttctctcctgctgtattattactaaattccagttattac

SEQ ID NO: 193 - DNA, 1342 bp, Homo sapiens
gtttaaaataacattgcttttatgtcaaagcactttggtaacttggcctcacatgctgacagttttggctaaatattacaaatcttgatcccagaagagcaagagagaaagttttactaatatttgcttaaacatcctgtttaacaactttataacatccttcggaatttttaaggtaataatgtgagatataagtatgataaaaacaacttttaaatggtatttaatgcaaatacagaataacgatgtcaacattttcctcagccgtgtaacctgagattcatcatgggaatgagaaagtaaaggccctttgtaatggcatgtgaaccagacaatttagtagccagggttgtaaggcaactcttaactgacaatatagttagtatattctgggccttcatcttcaaaattagtaggtagtatttattgagtgcatatcatgtgccaggcctggtgctgagtgcttacaatgatcattttatatatgggaaaattgaggctcagcagggtcaagtgacttgtaagaggtagcactagtaagtaacagtgctcaaattcaactaggtctttcagctttttatacaatactgcctgttatcagaaagtatagtcttaaaatctgctatcaagcatctatcagaagcctgatgagaaatattcagatgatctaacgcagttcccaaacctgcattgtgggccgttttcattacaattacctaaggtgctttaaaaattttcttgggccctactcgttgtggttcagcagctgtgtaatggagcaaaaaggaatagtcactaaacagcgaaggaaagtggtggaattattaaaagacctagcacttacctgctgggatgagtctctaaccccacagaattgatttcaaacacaggatcttattcaagataaggataataacagctatcttcttgggttgtaaaaagtagcattagactgcattttaaacatttggtatgattttgaggacataaccgtaaacagctatttaatactattccaggtagtcaaaggccaatgtataaaagttaaaaatataggtcttgtcagctttttaagcgtctgtcccactgactaccatatctctacaagagaatagatgaggaattgaggttatgtgggaagtacgtgtaagtttacagtattaagaaatgtacaataaaatttgtttctatgtcagcgaatattcttgactcaaggagtttgaaagtgtaaactcaaaggtctttcacatgtaaagaggaacctctccattctgtacttgtatagtcattacctcatatagatttaattttattaaattaaattttacttattttgggtttt

SEQ ID NO: 194 - DNA, 1116 bp, Homo sapiens
taagaataatgtaaattaaaaccactgtgagctatcacctcacatctataagaatggctattaacaagacatgagataaatgttgatgagattgtggagaaaagagaaccctagtacactgtttgtgggcgtgtagactggggcagccgttatggaaaacggtatggaggctcctaaagaaattaaaaatagaactgttatctgaccctcttctgagtaagtatgtacccaaagaagatgaaatcaccagctgggcgcagtgactcacacctgtaatcccagcactttggagtgggtgaatcacctgaggtcaggagttcaagaccagcttgaccaacatggtgaaaccccgtctctactaaaaatacaaaaagtaggcgggcatggtgacgggcacctgtaatcccagctacttgggaggctgaggcagaagaatcacttgaactcgggaggtggaggttgcagtgagccaaaattgcgtcactgcactccagcctgggttacagagcaagacgccatctcaaaaaaaaaaaagatgaaatcatcacctcataaagatatctgcactcacatgtttgtggcagtgttattctcaatagccaagatgtggaaacaacctaaatgcccatcaatggacaaataaagaaaatacggcatatgcatgccgtggaatagtattcatccttggaaaagagggagttcttgccatttgccacaacatagatggacctggagaacattatgctaagtgaaataagccagacccaaggaaaaatactgcatgatctcacatgtggaatatttaattttttaagaaagagctcaagtacacagagaaagtgcttaccacagattggggaagaggaaatggggagatgcaggccaaggatacaaaatagcagataaaatgaacaagtctagagatagggctaaagttaatacaattgtattagggatttttgttaaataagtagattttagctgctattatcacaaaaaaactgagatgataatgttaatctgcttcactatagcagccattttattatctatatgtatcccataacatcatgttgtaaatcttaaatatacctaataaaataaaattgtccccac

SEQ ID NO: 195 - DNA, 2831 bp, Homo sapiens
tggagatgatcccctgggcccctcagaatgcatttcctgtgtccacatagccgagattgcgccactttactccagcctgggcaaaagagccaaactctgtctccaaaaaacaaacaaacaaaatagaaaataaatacaatttttaaaaagaccccagtcatcatgcaggttacactgtggggataacacttctgggctaggagttgggcaacctgggttcaggcaccgcaccccctctgccggctgcacagggcccctctcccctcagtcagccctgggccctgcaggctggacttttgcctggtagctttgggctggccctcccttctgcaggggaccccttgtacagatgggtaagcagaggcacaggggcacaggcaggacagcggctctgctcacgcaggatgccatggccagtcgtgggcctactccatccttgatcctcccctcccaagggcacttgccatccaggcctgaatggcaagaggcccctaaggggcccccagtcctgtcggcaccccctttgagtgactgacagggaggcaggggagctggcagcccccatccccacaccagcttgtggaagctaccagcgatcggtggggccccactggcagcccgtccgtgtagccttggccgggcccccaagcttcttagaatgccatctaagaaggcagagggggatgagcggcggcggggaggaggggcggccttgggaagatccactgggtccagggaagcgaaggccggaccctcctcccccagcgctactgcccgggccgaattccaaggccagcggctgcccgctgagaaggaatccggaccaacgggattctggcttccctctggcccctcctggcgagagcggcgccgggaggagggggcctcacaaggggcgggcaggggcggggcccgcggggtaggcggagctcccaggaaaacagcgggcggggcctcgcgcgaggggcggggttggcggcgaggcgtcccaggacccccattcctccctccgccccggggcttctggggagcggcgcagcttgactgccaccgactgcgggcctccctgccctacaagcccccacccccgcccccccttgggacctggcgaggagttgccccgcaaagttggggctggtgcggggttaaggggattacaattttcctaggacttagtgtgctgaagctgcttttgcgattagaatttatatttacaatgctgataacaataaactacccaggctaccgcgccacgtggacgggggtggtggatggaaagggaaacccttggccaccagcagcctgtgataaggccaaggttccctggctggattgctgcctaggatgcctgtggtccctacccccgcccgggaggcaggattgactaatccgaccaagcaaggcctccaggctgggccaagaaccccttcccagtcctctcccaaagtctatgtccttgggctcacgctgtcctctcctgtccttgcctcctgcatctacagacccctgaggccccctcctccttcagagcatgcacgtcgcaaattctcaatgactgtttggaggaatgaataaatgaattgtgaacaaatggtctgaagattccagaggtagcctaatggggccctgctgcttgagttctaatcccagccccaccagttgttggctatttggccctgggcaggtgattattctctctttgcctctgtaccttgcccgtaaaatgaggagaataccagtacctactgcataaggttgttaaaggattaaatgagtgaatagttacaaagagcctggaacagagtgttcaaagaaacacacagccacagtattaaaaaaattaaaaacccatttctctccaggcttctgccatcactctgtgtgacttcaacattctacctgcatgacctatgcagcacctggccgctgttaccttgccaccctcactgacatcttctctgcataggccttccaccatgccctgtactttctccccactagaaatagccctggctctgaaatgtgttttaatcatcccactttgggtccaccagttcctagcctttgagcttaggcctctcctccaggaccctccctggctacgatttcccaacccctctcgaccttccattcactgaccttgccactttcttgcctctagtctgcacctctccccatccctagtgtggattccatccccttgtgaacgctgccacccgtcctggcagagactcagtacttccactctctgaatgcatttcttcttcctaggcacaccagaagactacatttcctagccccccacccccttgcagtgtctgggaccatgtgactccttaattaggtcacttctctctcctgggaggccctctctgccctctctaagtctaactagtggcaaaggatctaagggaagaaacctggcagagttactagtcccaagaagcctgggtccctgaatcaccacatggaagtctacgcgcccaccacctgaatggactaaggaagctgcaggatgaagacaacagcatcacaaggaggaagccaggatccctgtgttaccacaaggaggagagatgcctaaccaagaccgtctgcaaggattttgtgtgagccagaagcagagctgtatggtgttcagccactgagatttgagggctgtttgttacagcagttgacctatcctgactgacacatcacatcattcctttccccaccatgtgtctaacatgctaccaaattgaattttaagtaaattagtacttataaattaagtacaaatgcttttcaaattcacatgaatctttggtaaaaaaactggttgaaatttt

SEQ ID NO: 196 - DNA, 988 bp, Homo sapiens
cttcgattcggccctgcctccaccgccgccgggcctggccggggccccgccccccaaccagagctgggtgccgggctgagggccgcctcccgcctccgggcgccccgtcccgtccccagggggcctctgtcttcccatcctgattcccgggtccctgcccccgactctagctccccaggaggcggccccagcccagctagggacccctctcggaggccggccgccggggaaggggagggaggggccggggcaccccactgctcctgcccacactcctgagatccacccccttctcctgggcaggaagcctgggagaggaggctgaattccaggctggctgggagtagggaggagcggggtgggccgcctggtgtggacggtggtcggggaagccaactaggagatgggccagggagcgtttacaaatcttcagtttcatttgcggaggcctagccgtgaccccgcgcccaccccaaacacggatctgattcccacttgacacactttcccactggtcttagtctcacccacccgaagccagcaaccctctgcggaaaactcacacctacctatatccatccaccctgagcagccctccacccccaaatcgccctccgacgaccgccacccccacagttcagtctccccctcccatccctgccggccctcgcttctcccctcccccgtcggagtcagtccctctcttcaaccgcccccaccccctagtactggtctcagcttctccagcgggcctcagccccgtccacccccaaccccgacgcccctttctccgcgccagttctggcccttctcccatatttataagtgtccggccgggacgggcggtgggcgcggcgtccccggcgcgtatcgtaggcagtgtaccgtggccgtgccgtcagagtgtgcgtgtgcgtgtgtgccgtgtcgaggctgtgtagagtgcattgtacagcatattttcatgaataaaattgttttaaatatt

SEQ ID NO: 197 - DNA, 1015 bp, Homo sapiens
gttcatcagggatattagtctgtaattgtttttgttgttgttatgtcttttcctggtttcggtattagggtgatactggcttcatggaatgatttagggaggatttcctcattctctatcattggaatagtttcagtgaaattggtaccaattcatctttgaatgtctgatataatttagctgtgaatccatccggtcctggacttctttttgttggcaatattttttattactgtttgttggggtgatcagactcaacaccaggtcgtggtggctatgaagtccgacagagtcaaaaggaatgagacaagacaagttaagagtacatacggtgggtccagggagccaacgctagtatggaggctgcgaaggccctgagctctgggaacccatactatttactggtaatcaaacaaagaagcatgtggtgaggacgtgtggacatgggggtaaacaggtgaggacatgaggacattgagggtagaaaggcagtggtgcatcaagtgtagctgtcacagtttagcattatgctctgctacttgggataatggagaacaggttcttctaattcaagatacaatcaatttatgattttgggagagcaaggagcaaggggccagtgagtctggacacattccagaggctaagaggggttttatgccctgagccctggattccatccaagccacaaggggttttatgccctgggtttagattgtagtgctgtggggcagccttccactctttggcacagagcttggtgttccataggccacaaggggttttggaccctggacccaggacatgttccaagactcttctacattatgtcagacaaacaagccctgcctcagcccttctaccaatactgtttaagtctcactgcttgttactggtctgttcagagtttccatttcttcctgatttaatcaggagtgttgtatatttccaggaatttattcatcttctctagattttctagtttgtggaaaaaagatgttcatagaacctcttc

SEQ ID NO: 198 - DNA, 894 bp, Homo sapiens
catattaggagaagccattgttatagtacatgacatggccactattaaaaaatacaaccactcatgtggtaacaaattgaaatataaatcaatgtataaaccacaaatttaaaaacatattgtcttttattcccaaataaactatactgtaaataacagaactatttaccaagttatagaagttgtgctgcaccagttagaatggcaatcattaaaaagtcaggaaacaacaggtgctggagaggatgtggagaaataggaacacttttacactgttggtgggactgtaaactagttcaaccattgtggaagtcagtgtggcgattcctcagggatctagaactggaaataccatttgacccagccatcccattactgggtatatacccaaaggactataaatcatgctgctataaagacacatgcacacatatgtttattgcggcattattcacaacagcaaagacttggaaccaacccagatgtccaacaatgatagactggattaagaaaatgtggcacatatacaccatggaatactatgcagccataaaaaatgatgagttcatgtcctttgtagggacatggatgaaattggaaatcatcattctcagtaaactatcgcaagaacaaaaaaccaaacaccgcatattctcactcataggtgggaattgaacaatgagatcacatggacacaggaaggggaatatcacactctgggactgttgtggggtgggggggagaggggagggataacatcgggagatatacctaatgctagatgacgagttagtgggtgcagcgcaccagcatggcacatgtatacatatgtaactaacctgcacattgtgcacatgtaccctaaaacttaaagtataattaaaaaaaaaaaat

SEQ ID NO: 199 - DNA, 1192 bp, Homo sapiens
gtagacgtcggccacgcggccgaggcatacggccagaggcttggcctcgctgcgacccttgaggcggtacacagcgcgcagagccgccgagcagctcgccgcgcaggccaggccgtacagcgtatcggtggggacggccaccacggcgccggcgcgcagctcggccacggcggcccgcagcgcctcggtccagccggcgcgctccgggctcgcggcctgcacggccccgctccccgggagccgcaacagccgggcgccgggggccgccggagcgggactcggcgggcggaagaggcgaccgctccgggagccagcaggcccctcgctcaaccccacgctggcagccaccgcggccctcatccccctgcaccgacgcgccggagacatccgcccaggcccgcttccgggaggaagtgacgctcccagccagcttccggtccaggagactcggccccgcctctgcgccgggcagcttaaagggaccacgacccccaggaggattgaaggagaccgggaggctgccggcgtggaccgcgggaaggcggggctggggctcggcgggaggccacccccacagccgccccgggaggagcgcgcccagcagctgctggacgcggtggagcagcggcagcggcagctcctggacaccatcgcagcctgcgaggagatgttacggcagctgggccgccggcgcccggagccggctggtggcgggaacgtctcagccaaacctggagcgcccccccagccggctgtctccgccagaggcggctttccaaaggatgctggcgatggagctgcggagccctgaccatccccgagcagaataccctgacttctctccctccccagggccggtggctggactctgaacaactcccttcagtaaaggggccagtcttcactggcagtggctggtacttggctctcagcctggagtggcagctctgctagcagctgggttcactcccacttcatcctggctgaaagcagtgctgtgctttgaaatgcagccaatgaatacccagtctgattacccagatttgggcagaccagcagtgctcgccagagtggtctggcctgctatgggggatccaggtggtgttacatgtccatttcatgttttgggggcttttagccccacaaaacaccttcagtagagccttgattaaaaggaaacctgcagactctc

SEQ ID NO: 200 - DNA, 899 bp, Homo sapiens
aacttataaaataattactttcccgcccagtgagtgatgtttggaaatgcgtggaattaggattcatgtggtttctaagatttggacatgtcagaattttgtgagtcatggatggggctgcttttgcagtgggtgccacctgccactgtgcagccctacttggctcagcccttctcctcagctgtgagcactgtcctcaggagagtcacagggcttgacacctgactctgagctggaacagtaggggcagggagaagacaggtctcaagaaaaggtttttaagaagtttcatccccagttaagcagagtccatccttgacttaaatcccttattacagcacaactgtgtatctaatcttacgatttaggagaatgttacctaggacattttgatgtgttaagttgaagaaaggtaactcgtgtatgaaccccgagccatttccctgttgtcctgaggaggaactccaggcctcccatcgtgtgccctaaggcctcctgcgtcctggagccctgcctcccactgcctgacttcctgccacacggttaatgctgcagcaacaccgactgcttcatcttccctgtgctccacgtggcttcctacctctctcgcctttgttcttgttgaagggtctcttctcagctaattaactctgaatcatggttcaagacaagcctcaggcatcatgtcaatgggtgtttccctcaagcttagttggcagcactctccacacttctgtggctcagtgattactgctattactatatttacttgcatatgtcagaatgatgtgatagactatctctgtcactatgctgttgggttcctgaggacagtgatcatatctgattgatttccatgtgtccactgtctagcacagggcaataaaaaatacacccct

SEQ ID NO: 201 - DNA, 3260 bp, Homo sapiens
aattgataatagagaactaagccaggaagatgttgaagaagtttggagatatgttattctgatctacctgcaaaccattttaggtgtgccatccctagaagaagtcataaatccaaaacaagtaattccccaatatataatgtacaacatggccaatacaagtaaacgtggagtagttatactacaaaacaaatcagatgacctccctcactgggtattatctgccatgaagtgcctagcaaattggccaagaagcaatgatatgaataatccaacttatgttggatttgaacgagatgtattcagaacaatcgcagattattttctagatctccctgaacctctacttacttttgaatattacgaattatttgtaaacattttggttgtttgtggctacatcacagtttcagatagatccagtgggatacataaaattcaagatgatccacagtcttcaaaattccttcacttaaacaatttgaattccttcaaatcaactgagtgccttcttctcagtctgcttcatagagaaaaaaacaaagaagaatcagattctactgagagactacagataagcaatccaggatttcaagaaagatgtgctaagaaaatgcagctagttaatttaagaaacagaagagtgagtgctaatgacataatgggaggaagttgtcataatttaatagggttaagtaatatgcatgatctatcctctaacagcaaaccaaggtgctgttctttggaaggaattgtagatgtgccagggaattcaagtaaagaggcatccagtgtctttcatcaatcttttccgaacatagaaggacaaaataataaactgtttttagagtctaagcccaaacaggaattcctgttgaatcttcattcagaggaaaatattcaaaagccattcagtgctggttttaagagaacctctactttgactgttcaagaccaagaggagttgtgtaatgggaaatgcaagtcaaaacagctttgtaggtctcagagtttgcttttaagaagtagtacaagaaggaatagttatatcaatacaccagtggctgaaattatcatgaaaccaaatgttggacaaggcagcacaagtgtgcaaacagctatggaaagtgaactcggagagtctagtgccacaatcaataaaagactctgcaaaagtacaatagaactttcagaaaattctttacttccagcttcttctatgttgactggcacacaaagcttgctgcaacctcatttagagagggttgccatcgatgctctacagttatgttgtttgttacttcccccaccaaatcgtagaaagcttcaacttttaatgcgtatgatttcccgaatgagtcaaaatgttgatatgcccaaacttcatgatgcaatgggtacgaggtcactgatgatacataccttttctcgatgtgtgttatgctgtgctgaagaagtggatcttgatgagcttcttgctggaagattagtttctttcttaatggatcatcatcaggaaattcttcaagtaccctcttacttacagactgcagtggaaaaacatcttgactacttaaaaaagggacatattgaaaatcctggagatggactatttgctcctttgccaacttactcatactgtaagcagattagtgctcaggagtttgatgagcaaaaagtttctacctctcaagctgcaattgcagaacttttagaaaatattattaaaaacaggagtttacctctaaaggagaaaagaaaaaaactaaaacagtttcagaaggaatatcctttgatatatcagaaaagatttccaaccacggagagtgaagcagcactttttggtgacaaacctacaatcaagcaaccaatgctgattttaagaaaaccaaagttccgtagtctaagataactaactgaattaaaaattatgtaatacttgtggaactttgataaatgaagccatatctgagaatgtagctactcaaaaggaagtctgtcattaataaggtatttctaaataaacacattatgtaaggaagtgccaaaatagttatcaatgtgagactcttaggaaactaactagatctcaattgagagcacataacaatagatgataccaaatactttttgtttttaacacagctatccagtaaggctatcatgatgtgtgctaaaattttatttacttgaattttgaaaactgagctgtgttagggattaaactataattctgttcttaaaagaaaatttatctgcaaatgtgcaagttctgagatattagctaatgaattagttgtttggggttacttctttgtttctaagtataagaatgtgaagaatatttgaaaactcaatgaaataattctcagctgccaaatgttgcactcttttatatattctttttccacttttgatctatttatatatatgtatgtgtttttaaaatatgtgtatattttatcagatttggttttgccttaaatattatccccaattgcttcagtcattcatttgttcagtatatatattttgaattctagttttcataatctattagaagatggggatataaaagaagtataaggcaatcatatattcattcaaaagatatttatttagcaactgctatgtgcctttcgttgttccagatatgcagagacaatgataaataaaacatataatctcttccataaggtatttattttttaatcaagggagatacacctatcagatgtttaaaataacaacactacccactgaaatcagggcatatagaatcattcagctaaagagtgacttctatgatgatggaacaggtctctaagctagtggttttcaaactggtacacattagactcacccgaggaattttaaaacagcctatatgcccagggcctaacttacactaattaaatctgaattttggggatgttgtatagggattagtattttttttaatctaggtgattccaatattcagccaactgtgagaatcaatggcctaaatgctttttataaacatttttataagtgtcaagataatggcacattgactttattttttcattggaagaaaatgcctgccaagtataaatgactctcatcttaaaacaaggttcttcaggtttctgcttgattgacttggtacaaacttgaagcaagttgccttctaatttttactccaagattgtttcatatctattccttaagtgtaaagaaatatataatgcatggtttgtaataaaatcttaatgttt

SEQ ID NO: 202 - DNA, 1495 bp, Homo sapiens
gcctgatgtataggaaaatcgtgtagtcttctttcttccccaattgtttccatggatttagacactagaagtgtctctaaatttatttcattctcataccaaaaaaaaaaatgtggtttgtttggcttgtaaagtatggacataaaaaaagatagcgggccatgcacagaaaggcagaatttaaaagctagctatagttttttagagataagtggacctatattttttctcttgcctcatactgttcaagtcagggcttttattccatatttagccagtttctgcacatcctgacgtttttcatagggtactaggctgcagtattgggctttagggatcgtctgaggggagtccaactaggatttctgctgcttcagcagcccagcccaggcttgtcattgtgtgccctgcctgttaagtaactcatcacagaactgttattctccacttggcaaaacccagagagccagctcacctcagattgcaggtttagtaaactaagcaggagggagtgctgaagaccaatctcaggcactgccgcacaactcgggactcaacacccaggctcaggacatgtatgttaaagcagtttattcaaaatattgtttaaaattatgtttcatttacatttgtgtccataccctttccccccatattttgctctttccccctaaattgatgatttgcacttcaagcgtgcctttcctttgagcttcttaaatgctttaaaattttaaccatgttaagtctcccctgggctttggtacgttggcagtggatggagccgcagaagagaggaagggatttctctggaaatgaagctgcctgtgggtgaagtgtggctgtttagggtggaaagggaagggttttctctctgctgtaagagtgtgtggagcctgagaccccttgcctgtgtgcctgcatgctgggaggtaagggacggtgttagttgagggacatgatccggagccctgggagcctgtccactttgcacagtagcatcacccttattccctgagctggcacgagtcctgtggcccttgcccgagagtccaagggtgggggactttgggtgggatcttctaggaatcatgcggggaggcgggcaggttatttcttggaacagtgaaggaccttgccgggctagaccatggtacacatggaggggaacgttagggtgtaaagttggagaaattcagaactaaattgtaacgggcttcaaatgccaagctgaaccatttgggaactagtaatgtttttgagctagtagtagacattaaagggaaatggcacaaaaccacttattggcattgagtgagacctagctgtttacctctttgtgcttagtgaccttcactgatgcattgaacctctctgaccctcagtttcctcatctttgcagtgggagtaatcattcttacctcatggccttgttcggagagttaaatactgttagtgggtgctgaataactgctatctctaaaagaggaaaatg

SEQ ID NO: 203 - DNA, 2416 bp, Homo sapiens
tgacttgttcatttgttctttatccattcacttgttccctgcatattttgaaagtgttttgcattgcattgaactggagacaggggatacaaaagacaagccctgcttttgtcactcagtcctgtggcccagtttcctttcgcgcttttctcttccaatggtggggagaaggatccagagctccctaggtgcactgtccagaaaaatggaaaagtgaagtcaccatgagaacacgaagttcagcgtgagagtaccagcaggtaacagttattgagtacttactccaggccccggcattgtcctgtgccctgtacgtaaattaaggtcttcggatctcatgatgccaggaaaccccagccccacccactagtcttctctgttctgcctctggtctttctgtttctcccctctgttcccagtgtcctcacccgaatccacatctgtgaatgtccctctgaaccattgccgaaactttctagctagtctcctttcagcctcttctcctgtccagttctcacgtctttgtaaatttccatgtcacttttttgcttaaaaccatcaggaacaatgcccttttaacagtagactttcaagagagcgtctggctttatcttccttctttattgtgaatctcatgagggcaacaagttataaatacttggcttcccaacaagcgtaggatagtgcctggcacacagcggccatccttgatgttgagtggatgcatttccttgcagttcccaccatgcagtcagcagcgccaacccatgtaggggacctttgatcattccccagttctctcagcctcttctgactcagttccctgtccccataaaagtttgttcctcccctgctgttttggctgtgagagaatgctgacaacaccagcaaaccaccacgcggcgagtgcttcagtatggggccgtggcctgtgcattccataaccctgctgcctggcccagtgtgtagcacctgatgtttgcaatcatgttcgtgcagagttcacatatttgctctgttacttttttatttaattgaggtgaaattcaaagaacagaattaaccgttttaaagtgacccgtgcagtagcatgaagcactttccctgcatgtgcggtccccacctctgcctagcaccagcctttccatccctccactctgttgtttaccagctctgtgacattgtcagctgcttcctctgtaagacgtgactgcgaattctgacctgccaggtttgaggcacaggacttgcacacggccagtgcagaagtcccataagaacataacctacccaaggccagctcacctctctgttacatatgctcatgagattagtgctatagactcagtgtgccacttccctgcacatgcgagggacgacagtgtcctgacacagcagtgaacccagtgtggtgccaaggagaaagttgtttttttggggccagccagcacacatggggtggcttgtccaataccctcaccggtccagatatttaatactcaaaaactgtcttctccaaagctgtcttctccactgtccatcaagttggggtcatgaagcatttttcttaaaggggaatgagtagaaattgcttagctatattctactccatccagtcttgctcaaggagaggtctgctgcaagcaagagacggcggctacacccctactggaagtgcttgacctgcaggaggcacagctgccctagagttaaccttgaggggtacattatttttgatctctgaagcccactgtggtttctgctgccttggtggagaaggcagtgcaggtacaggagactcacatccagcccagctcgccctgctgctgggggcctcaggcggtggggatgcaggagaggctggcgggctgccattgcacactgctgccggcctggcctctggacacatggccagtgtgcagggtgctgtcccggggatggtgatggttgcacttcattcattccatccacaggtgtctgtggagggcccacgacgtgtcagttgtggtgcgttgtggtgtgcaggacagggaaggtacctatgcctcatgcagcagtggtatagtcatgtgagagtgactagtcatttctgaagcatcttcaacatcacattaaaaaaaaacttaaattaggccgggcatggttgctcatgctggtaatcccagcactctgggaggccgagtcgggctgatctcctgagctcaggagttcgagaccaccctgggcaacatggtgaaaccccgtctctactaaaataaaaaaatatatatatattagctggacatggtagcacaagcctgtagtcccagctacttgggaggctgaggcatgagaatcgcttgagccccagagacagaggttgcagtgagccacaccactgtactccagcttgggctacacagtgagactccgtctc

SEQ ID NO: 204 - DNA, 1223 bp, Homo sapiens
  misc_feature 1143-1148,1163,1189: n=a,c,g, or t
ggccgcttttttttttttttttttttttttttttttaaacacagggagactgcattgcttattgatccaaaaaattcctgttcttcatcccgccagtgggttgctctggttgtgggacatgaactcgcccatcaatggtttggaaatcttgttactatggtatttaatatttttaagtgctcaaatatatttatcttcatcctactccacattattttggctacatagtatttcaagtttggctgcaacactgtgccaaaaaataattgagtgatagaaaagtattattttaaaaggtccactttgaaagggcttatcagaatctctgcattgaacaagggcatatggacagtctttattcaacagacacttcctaaactgttctaaaatttgtctgcaagtgggaaaagtcaagatactaatttgggtgagagaaaaacattcctcttaggtgtagatgaatgaatcatgcagtgagattccaggctaactgtagtttcttgaatcttatttgttaatctgattcacagctgaaaagtaacctgatgaataacaaactgatctttaattagagagaaatgtttttaggagtcagttttttcattgcctaaaatgttaagttgaattttaatgaaataaaagtaaacaaactgcagagtgactgcagaataaagctgtattaaaattccagctgttctgttgaaatccttataatgtttgcagtaatgatctctgtccttcagtcctgatttttcactcttactctaagtaaatactatttatgaatgccaactgtgttagagcttgggagcacaggatttaataagtgaactagatgtacctctgcaattaaataactggatattctggagccagctagattccctgacattttaggctgccaaagagcagaacctgatttgaatgtagattgagtccatacgtcatataaataagaatgtaagacatttatcaactattacgtgtctcagagagtttctacagaaagtcaacccttgaaaataaatcttttccttttattttggatgtttaaaattttacaggtgaaaaaaattctttgaaatataatttcaggccgggcacggtgctcacgccggtaatcccagcactttgggaggctgnnnnnnaaaatggcttgaggncaggggtttgaggccaggctgggcancatagtagagaccttgtctctacaaaataaaagt

SEQ ID NO: 205 - DNA, 1026 bp, Homo sapiens
tgaatattatggtatgtgaattatgtctcaattaaaaaaaaataaaacttaacctggtttacaaagccttctatgatttggtctggctcagcgtctctcattggcttccctcccccgcctcccgctttcctcttagctttaccatgctacagttccttctgcctccgagctctccaaactctccaatctacgtttgcatttgctacttatcctgtgcaggaaccattctctcctccacctatcccttgtcctccccacttgactgactcctccttgtccttcaaatcttagcttgagatgatacttccccagaaggcttggtccccccgaactgggttaggttctcctgatgtgtgtttcatacttagctcttttgtagcattcaccaaatatttgttcattctgtatttattgagtgactgctctgggctgggcactgggctagggctgagtatttcataaatgagagctgtggcccctgcccccatggtacttacagtctaagaagggaagaaaatggacattaaacagtgaattacactaaatattttaattataattatgacatttcagaacaccctggggagggcgtgttaagggacttgacataactggaggtatcagataaagtgtcatttaagcaactttaaggagccaggtggccaactgaagagtggtgggtggattgttccacacagaggaacagcatgtaggaaggctctgatgcaaagcttggggggcatttcagaaactgaaaggccaacgtgggagacaaagaagagcctgaaagagccaaatcttaccttctggaccatggtaagggtttctaagttcatcttaagagaagtaggttgcctttgaagacttttaacatgggaactttaaaagttccccgtggcggccgggcgcaatggctcacacctgtaattccagcactctgggaggccgaggcgggcggatcacgaggtcaggagatcaagaccatcctggctaacacggtaaaaccccgtctctactaaaaatacc

SEQ ID NO: 206 - DNA, 1643 bp, Homo sapiens
ggtcatccagccagtgccagatcatcatgagaaagttttgttagaaaagttttcctttcatagtcccaggtgagccatctgttgcaacccaaggtaagtatacgcatgtacctcatcagacctcagtccaaataaatgtagctgtctgtagtcctcctttttccccactaaatgctcatagctgttcaaatgttcttcatatactatggttttctagactctccaccaccatgtcttctctccactgcaaagtgcatcatttgtcatggttcccgaagattaagacccctgccaaatgaatacaatactccagacgcatgactggatatcccatttggtgtcatcttttctaagttacactaatggggctcacagcttttccttcacctttgttttctcctttttcctagattttaatttctttattcacactttccaaaccaactgatatctttagccttaatctgtctgctctcattgttatttaaattcctgccagtcactttctggcccatcaccaaattaacattcttgcaagggctgttcagaaagtaaatttacaaggtgtttttagaaaactgattttaagagatggcaagtaatccctataagtatttaaacagcagctgattgctatgtttccacataatccaacagattcacacattttttagaccacagggccagctttttatgccagctgagtaaaagttgcagggtctttggttattaaatcaacttaatatcatatcagtgaacacacgctttattgagtctcggggttgttgcaaataatgtctccaagagacagaatgagttttgcttgaaactggggcactgatactttcccacttcgagtattgatttgtttagtgatttgtcctctgtgtggttccaggtccttaggttacatctccttattcactgctattctactttctccccagaactggacgtgtcattctaatacattttcaattaaaaatgtctttgacataaatttaaacaagttaactgtgaaattctgcagcagactctactttttttcatttaaaaaatggaaacacatgttataaaagaacatttaatgacatggaaaaatattcaagatatattggtaaaggaaaaaagcagatttctaaagcacaaacacaagatgaatccatattcgaaaaatagaatacagtatgtgtgcacatgtgcacatatatgcttgtataggaaaatctgagaaagattttcttcaggttatcaggtcctctcttttacattttctaaagatcactttcgtccttcttctttctcagctatattttctacattttctgtaatgaacactacaactttaataaaaacaaaacttaatgttacttatctttaatgtaataaaaatggaagcataactctaaacaattaaacatgataccacatgtccagaaaaagtcctctttgttttgagacagagactctgtctcaaaaataaataaataaataattagctggattaggtggtacatttctgtagttccagctattcaggaggctgaggtggaaggatcacttgagccctgaaggctgaggctgcagtgagctgagattgcattactgcactccagcctgggcaacagagtgagatactatct

SEQ ID NO: 207 - DNA, 1766 bp, Homo sapiens
  misc_feature 1546-1548,1568: n=a,c,g, or t
cttgaccttgtgatccacccaccttggcctcccaaagtgctgagatgacaggcatgagccactacacccagccagccattattttttatgtgtattttttctctttattttctcctgacattgacttgttggaaaaaccaggtaacttattcttttggaggcttcacattctgtattttctgattgcttcccatgacgtcgtttggtttgttcccataacccctgtatttcctagagactggaaaagtcttgcttagtttcaggttcaactctttttttggcaagaatcctttataggtggtgatgtgagctttatatatattttcctttttttttttttttatcattctgcatggttgagaggagtgagctttatattgtatcatatcaggaagcctatgatattccactgtaatggtgctcagtttgatctgtgggctcaggctcccattgaatttgtacctaatggtttcatccattgatgattattgcttgaatcaattatttcactagaggttgcaaaatgttgatttcccattctctcatttcttctaaatttattagaagaaaatagacaaggtgagcctaggatgttttgttgtgtcagaaagcgaggaaactaatatggtcttgtcaaaaggactcagaagttggccaggcgtggtggctcactcctgtagtctcggcactttgggaggccaaggtgggctgatggcttgaggcctgaagttcaagagcagcctggccaacatggtgaaaccctgactctattaaaaatacaaaatttgccggccgtggtggcacatgcctgtagttccagctgcttgggaggctggggcaggagaattgcttgaacctgggaatggggaggttgcgatgggccgagattgcgccgctgcaccccagcctggataacaagagtgaaactccgtctcaaaaaataaaaatagaaaaggactcagaagccaacttgaagtgcctctcgctgccaaagataggatagtctgagaataaaaagaataatgactgcaattagttgaaacacatggaaataaaaagaaacgtaaggtcatagtgatactttttaaaaggccaaggaaacacagtgaaacaaaattcattggtcccattagaggtaatagggcaccaattccttactttgaaattttgcaattaaaggaacagaattcagcatttattctgcctttcctgaatgaactgtattttagagtaaccaaatagtcctagttgatgagggaatattttgttcgtttaatatgaaaaaatattctgatgtttagtttaaagaaaaatggactccaaatatttcacttagtatactagagtatttcagctgtaagtgccaaagagtgggcctaattcagacagttctcaagaaatcagatttaagctgggcgcagtggctcaagtctgtaatcccagcactttgggaggccaaggcaggcagatcacctgacgtcaggagttcgagaccaactactcaggaagctgaggcatgaaaatcacttgaacttgggaggcgggnnnggcagtgagctgagatcatntttgggtgacagagtgaaactgtctgaaaaaaaaaaaaaagtgaatatgcttgcacagataaatacaaaaacatctgggtgtgtatagaccaacatgtgtggcctagggtaatagtattgtggctgatttttagtttattgtttgctcaactgtaattttgtatttttcagctacaactattaacatagcttgtgtcc

SEQ ID NO: 208 - DNA, 1460 bp, Homo sapiens
  misc_feature 1427: n=a,c,g, or t
gatgaactgttttccagtacagaaatgcctgttttcaccaggagtgtgcaatcttcaacatgtggcagtataaaagttctattttatttttctgatctagcgtgtgtacatggaaacccattgtgtgttcactgtgtttactctgaggttgagacatttccatatatctcttggccattcatatgtcctgtttggtgaagcgtctgtttttgatctgtttttctactgggttgtgtgtcttattgctgtatttcgattagagtgcttcactgattatatatgttgcaaatatcttctgattttccttccatgtttttaatgatttatttaaataagctaaagttcttaatgttagtttatagactttacaatattttctttcagattagtgctttggaatttttgtttaggatatcttttcctaccaagagatatgaagatttccttttattttatctgaaaaaagcttaatattttatctttcatattgaaaccacacagggaatatatttattgcattctgtaagaggtctagtttatttttccttagaatatcacaatacaatttattttaaacagtttgatccatgtcactaaagttcaagtgatctctttgtctacctctgtgccaatcatcacatttttatcttcatgattttataataatccgcaatttatatttttatactttgtttatttcttgccaatatgcattgcatccctgagaaaagtgtttattttgcgatggttggtgcaatgtgctatatgtctaatatctcaaactgttgaagtatgttgttcacatactctatatagttttccaggtggtagtttacatattctttcagtaactaaaataggtctattaaattttcccacgatgtttatggatgttttaaaatcttttcgtatatttttccaaaatttagtttcttgcattttatatgcttatgaattttagtggatacagtctagaatttttattgcattgtggcaaattaaggttcttctcattataaagtgatcctctgtaagtctgtggtgcttcatgccttaatgtctgtttagtttgacgttaacattacctttgttttgttagtaatccaattgtgtatagttcccatgtgtttacttcaggcctttctgttgactcaggttttgagtcttttctacatagcgtctatttgggtctcataatctttgattttcaaccgcagatccactgatatttacttttatttttgatatatttgtgtttaagtcttctatcctaaattgtgctactaatatcccacttctacatcttgcttgaattgctttttaaaaaatcattcaggccaggcacagtggctcacacctgtagtcctagcactttgggagaccaaggcaggaggatcactttagaatcctccaggagttcaagaccngcctgaggaacatagcaagacctcatctctatg

SEQ ID NO: 209 - DNA, 1395 bp, Homo sapiens
gaaattaatggctcagtggctactacatataactcaaccaatgaatttgtatgtctgtttcttttgacaaacatcatctttatagactatttcagacatataatgtcatcattctgtatattgtgttaggaaaaattatcaaaaacttaggactaaggcaaaaagaagtctgcatgtcctttcaatgtcacactggaatatcgtccaggagatcactcacggattaatcatctaggggaatggaactttggttgtttgattattaactcctaattaaagcctagactgtgaagtttcatcttactttgtagatttttattttgaagagatgcaaatgaacactttttggctaaaaaaaaaaaaaattaaaacacaaatattattgttttattgactatagattattatgctgttgtgtatttaatccagcaattttattctgactttctttcatcattttctataagcattcagttccccaaatactctttgaagcaattttatcatcctggttgttccctcattagtgagttgaataaatctttgacttgttcttattctgtattcatatatgagttatgtcattgcattttatggcaattttacattatgtactaaattaagttgcccagttttcaaaaatcttcctaagagttgtaccataattaatttttctcaactctatagtattttccacaaaaaaactatactgaaattaaaaagaagattcatacatttcaaaacaactgctttctcctggcgcaatgcattaagtgtaagtgatgagcagagagcctcctaggcatgtaccccttcctgcatctgtttcttcagaaagatgtaaatgcaatgtcctatttttacccacaaacaagtccacgatgtgatattatttatgaaatggtgaaataaataacctcaatttaactgatgtaatagcaaatgtgattaatggaatccatgcaaaagtttgacttatttatttgccttaattgaatgcctaatcatgactcacagatgttagagttaggttttttttttttaatatgggcataaaatatgcaaactttttgtctagtccggcttcttttggagacttaaattaatattcattttgcgatccccttcaattgtcctgtttcctcaacccttgcccaacaaatgttaacaaaaatgtttttcaatgaaatctactcactaatataaaaaaaccccagaaaacaataaaccaaaaaaagtagcttgaagttttactatattcatttttaatgattactcagaaaaacagtattaaaaacaaattaatatgtgcccaaaagggataaaagcttcacaaatgtgtttataatctaaaagaagatgacagacccaatgtatgtgagttttaagaaaagg

SEQ ID NO: 210 - DNA, 1451 bp, Homo sapiens
gggtatctgtgaaggtctcaggagagctatggctatttatgtttctgtgcatacatgtatgcagtgtgtttacattccctgatcaaagaaggattaacacactaatagatatggatgattacatcagggataattgtgccaagaaagatattctcctgggagcaattctcttatggcccaactcactcttcactgataccaccttcccagttatttccatggtccctcctcccaccacacacaagcaagacttggtgttctggagggctcataaatttataagtcttaggagaatgagctgatgccactgccagctgtacccacagcatagtatatccagctacaaggaaagcatcttccatccagtgagtgctccctgcttcacactgcccacctgacctctttatctagattttattctaaattttaacacttttgccaaaattccaggcagcctttaacccttatatctccccttctaaatgtgagccaaatctgaccccttccaaactccaggatcacagacacctgatgccaggtttccatctaaatcaaaaccataataccaaaccacatttcactgagttaaggtccggcgcatcatttatagatttttgtctcaaggatattttatacttcttatttaaaagcctacaatttgaatgtttgcctttgatacctgacttttgtgtgtacagctggagaaaagttacagaaccaaatgaactgaagtcatttaacaatgtagttgtcaatcttagctggattttcagtattgtgtatggcagcatatatgtatgtatatgggaaaataattggtggagatattattgtggttttgttaatgctgatgcatttgtgacactgtgtgtgtataaacatttattcaggagagcttaaaaataagagaatatttgaaatatattgcataatcccaatgagtcttcctaagttgttgcatgatagtattttgtgtgagtaggggagtgtttgatagtttgtgtgtatgtgtgggtatgagatagtgcctataaatcccgggtgtgtaagtatgagagtgtaaaaatgtatatttttctggtacctttgagtgactgtgtgtgtgtgtgtgctcatgatattctgtgcattgcttgtgtctctcccccttcttgaccttccttccaagataggtcacatttaggaagttttcatggacactcctgtggacaaagcaaagaaaaaatgttttgggggtggtggtggggaattttctccatgggggaaaagttttcaaagttgctttgtagactgatgaaaatctggaaaatagataaaattttcccttctagactccctcaatttgcatgccagtggttacagccgggggtaaccctttcttgtggatgaattcttagaagagtctttttatttcttcatgactcagagaaaatcttgcagcaaaggtaaag

SEQ ID NO: 211 - DNA, 893 bp, Homo sapiens
aattgctgtctgggttgatgcatttgtctgaatggagggtggaagaaagactgagaattacattatgtgaaagcccctgcccaactccttgcttatgataggaagtctgtggccactgacttcccatcttatgttctatgtactgtatgaagtagtatggtatagtgatttagaatgaggctctgtagttcaacagcctgaatttgaaacttgactctaccacttattggatgtgtgagctcagcaaataatgtctttctgcttcagttttctcacctattaaatagagataattagcatctttctcatagggttgtggttgtggtggtggtggtggtggtttttcactcaggcaaagaagcattgctctgctaatggaaacctggagaagtgcttgttagcaaacaatactctgttctccacctcctccatataccagggaaatgttggtggtctgtgaaatggaaccaaaattaatgttcctctcatgaaggaaggaaaaggaaataacatgtgtttcgtatgcattatctcacttaatccttagattaattccttcagaataaatattattagttgattttttcatgtgaaagacctgaggctcaagagagtgcttatgcaagatcaaatgtctgctgaatagcaaagccaagattcagtcagaggaatagctgactcaaaagcccatctgtttccacctcattctactagctaaattgccaacatttggggcatagctgctttcctccttttctagatgtggcaaattaaaagaaacctgtgccacaatccagtccatctgccctcactttccttcaagtgagagggagcacgcacagtgcaatctcaaataaggtttggtcactgaccaaataccccttctttttcct

SEQ ID NO: 212 - DNA, 1358 bp, Homo sapiens
caattttctgccactggttcagctgttagcacagtaaaaaaatcatttgtatcaaaggggcaaatgctttattaaggtagtaaaagggaacattacttctgcttttaggaagttactgcaagcacaagcatttgtgcttttaagcaaattaaagtagtaaaagaaaaacttaagtgaaacctttgccatcttcatgttttataatataaagcttacccaacaccagttaagccatggttaacctaaatgcctcatgccccagttcagcaaaaggaggaaaatgtgcctgcctcacagtcatcagtctttttaaatcttttttgttgttgttcttaagggtttgaatttgtctgcattccttgtctttaggggaaattcccttttcatattgtgtgcttcccaaagctatagtcatagatttcttccagaaactattgtcataattgtcactggagtgcttaaatatacgtactatactgacaaaatacatggaagtgagttataatgaggcagaaacaaaatcctcggtaacattgatgatactctaccgatcaccgtggttttggaaagtcagtcaacagttgtattattgcactcaatttcattgtgacattttatttaacttcttcatcttggtggtccttgcccagttattttgcctcattagacatcaagaaatggagaaagactgaaagttaatatcttaagtgcttgttcttcatgtttccttcttgttatttatgctattctctttgtggctccattcttctttcaatcttctcagcttataaccgtctttcccttatgctaaggatagcccttacactcatcccatctatgctgtcaagggctgctggttggtgctggtacaaggagcccactcagcagttttcttacctttgcctgccctgcctttcatggaataagaaaggcaacgttttgcagcttccaaatttctgaagaaactaatctcagattggcagttaaagtcaaaatgttgccaaatatttattccttttgcctaagtttggctacccggttcaattgctttttatttttaatgtcttgactcttcagagttcgtacctcaaaagaacaatgagaacatttgctttgctttctgctgaatccctaatctcaacaatctatacctggactgtccagttctcctcctgtgctttcttctcttctatccaagtagaatgtacgccaggagctccttccctctagcaatttctactaaaatgtccaagtagaatgtttccttttacaatcaaattactgtatttattaatttgctagaatccagtaaatcattttggtagctctggctgtgctatcaataaaaagatgaaagc

SEQ ID NO: 213 - DNA, 1803 bp, Homo sapiens
tttgatactaagaggataaagcagttgaatgcattttgtgtgttcattgaactgcatatttatatatattcctctcctatcccagaatgctggaagaaccccttctggggcctcttcagccactttcttctaatacacctatatgggcctgccgtcttaggagctgtgaggtgagttataaataatcattacctagaattacttaactgattataaccacaggtcatccccaaatgccacttttgagtacaactaatatagtctatagttacagtattttgtttgtgtttatgttaaatctgatctcatctattgttgaattcttagagattctaagctctgttaaagcagaggttatatatatctctttacatttcactattatttcttctcttgcaactctcttccctcgtagtccatgaaacttcactatcatgtttctctactatttacttttcaaccatttattttctttctttgcttgcacttatttttttttttttcatattatcagtagaaaattcttcaaggctcactttctgactttgtcttttttctctatattttgtcttttggagcacttacctactttgttgactttcaactgacatctacaaaaatgattttcaagtccgtatcaccagtttatttatttatgtatttatgtatttatttatttatttattgagacagagtctccctctgtcccccaggctgtagtgtagtggtgcaatttcagctcactgcaacctccacctcccaggttcaagcgattctgctgcctcagcctcttgagtagctgagactacaggcgcgtgccaccacgctcagctaatttttgtatttttagtagagacagggttttgctatgtttgtcaggctggtctcgaactcccgacctcaggtgatcctcccgcctcagcctcccaaagtgctgggattacaggcatgagccaccgcgccaggccagattccagaatgtcgtgccttcctcttgtcccaatttggctacttggcctttgtcctcttgtgcttgattacaggaatagcctgccccctaacatctttgaccctcccatttctggtccctaatgtatatttttctaaggctacttgtatttgaagattgttttaattgtcttttctcagtgcccaataagtcatgttattttttccacattatttagccactgtagctagcttcaaaggcctttcataatctggtatcatcctacgttgtcctactttatttcctacttttctcaaactcatcttcattcttgctagcctagtcctcctacttttgacagatactccagaatttttctttagctctccctttacccatttttatttccttttcctatatgttacttttttcttctacttaccatttctaactattcttcaaatcccaatgcaagtcctacatgtcttttctataaattatctaatgattattttagcctttatctatttctctctttaaattctttagtattaattgtcattcttaattatttactagcttaggccgggtgcggtggctcactcctctaattttagcactttgggaagccaaagcgggcagatcacttgaggtcaggagttcgggagcagcttggccaacgtggcggaaccccatctctgctaaaaatgcaaaaattggccgggcgtggtggtgggcacctgtagtcccagctgctgaggcaggagaatcgcttgattttaggagatggaggttgcagtgagccaacatcacgccactgcattccagtccgtgacagagcaagactccatctc

SEQ ID NO: 214 - DNA, 1772 bp, Homo sapiens
cgcctttctacttctcaatctgatttctatgaggtttttttaaacgagcaatccttggctgcttccttttcttaactctttcagtactgagagcagcccctccacactgaaaacacccagcactgtgacggagtccagcctggttctgggtaccgtgggccctgctcctgcccacttagcgaggcatgggctccttgcctcacctggccccggcaatcccactgaatttctactctggggtgggtggggcacacacttcggtttttttaatgccaattccgttttcatgccgaatctaagaagccacaacttgctttgtcagcttcagggcaggcagccatgacttcatttctcgcctgaacaaggaccatgctgtcctgcacgctgggtctgaccgtctgccctctctccccagcaccaagcgtgaccttggctgtggcgctcaacggccagctccggcggcccctctgctgctcctcggctttcccggaagtgggagagcctgcctggcctcggcctttgtccagcgaccaggctctgtccccgagaagctacggccgacctgggtctggtgttgggacgcatggaccgggctggggaggtgcacagagtgatgttaactttttcccgtgtgtagatatgtacagccaaagggtcgtgtaaatgttctgcaaaagtgggtctatacagagtgaaagctatttattttgtgcagagaaaaaagtctggagggatggaaccttcagggtttattcatatttaagatgtagctttttgttgtttcaggcattatgtataaagcaacgattattttatggaccaagttttcatgtaactgttgcagtgaaagtgcaatatctgacccccctgctcccagcaggaagttgcttggcccgacaatcacagcccctgtcaggggccctgtggccagtgcctcctcctctcttggccccaccttatcctgtcttgcctgctgcctgggagaccagccatccagagaagcacctggaagagtctcgggccctcctgcaataaaggccgggaggccctgtgggcagtgggctcagcctctccccaggggggcagctcccccacggctgctcactccccgcctgcctgcccagccgtcagccatgccaaggacaacagcaatagtcccctggggctctcccagcggccctcagccatagatggcaaggtgggcaagcctgcccccccatgggaagtctcttctgtatccaggtctgcttttcacctcccttcagattccttttggcacattctcctcttgaggaagtaccagtctttctgaaactaagagagggagggcagcgtcctttaaaaataccaaaaatgtttacagagttgggtgctgagctgcagggctcaggcctgaccagtcataaccaaagggtgaggcaggccttgctgactgccaccccccaggcctgttagaatagaagccttagtcccactcccaccacacccccacgccccaccacctgccttctctttgatttctaaagagggattcagcagagaccccccacccctccctggctcggtctgagtcccactgcccaccccatcacagccttcacgtctcaacccctcccgtctggtctgtccgtgtgccgtctgtttctctgggccatgtgtgagcagtgtcccatctccccatccgtccctgctgtccccgcatcattgggcctgagtgtgctctgtatacaacgtcatgtctgttacaccaattaaagaagcgggaaggcttc

SEQ ID NO: 215 - DNA, 1519 bp, Homo sapiens
  misc_feature 440: n=a,c,g, or t
gaactcacctttacttgacctgtccacaacatttgacaaagcttaccgatgactccttgaaacttgactttatttggtttatagagtaccacaccttttggttttctcccaatcttcgtaaccattccttctcaatctccattcatgcttccttctcttctaactgttctctttatgttggagtgtcccagagctcaacatttcatcctcttctctatttttttggcttggcgatttcatctagttttataccatctgcgtgctaatacttccgaaagctatgggtctatactgaacctctccctgaacttcaggacccatatatccagctgcccattcaacacctctgcttgaatatgtggcagatatctcaaattcagcgtaccatatctgaattccagatgtccttaaatgtttttcccatctcagttttgacaatnctgtctttccatttgcttagatgaacataccttggaatcattcttgtttctctgcctcatatgccacttcttgcagtggttccctatgacccagagaaagagccaaaatcagccttcatggccctagatcgttctgccccagttattgttctgacctcatctcctaccacacactccccgcttacccactctgcaacagccattctggcctctttgctcttcctcaaacttgtcaagtacgttgctgccccaggccttttgtgctgactccctgttacatgaagcactgtcctcaggtacatacgtagctcactgtccaaagtcagacacatcaccaccttctcagacctaatctgacccccccaacagcctacagctttcttttttgtttcatgtttctccataatccttacctcctaaaatgatctataatatccctctgttttgtttgccccactaggataaaagtttcacaaggacagggatttttgtctgttttgtttacccctgtatcactaggattaaaataataagagcctattatgtgccaggcactgaatggtttattttgaataggcataatgtatttttaaaatgtaaatatcatgtaccaatgttaatagcacaaactgctaatgttacaacatttgatgttcccaaagtttctgagacttggaaggaatgttacaattttaatttttttgccttggaaaataaacaatcatcagtctttgagttttgcggtttgaagaaaacaaggctgggtgcagtggctcatgcctataatcccaacactttggggggccagggtgggaagctgaattgcagccagggatttgagactagctgggcaacatagcaagaccctgtttcaacaacaacaaaaaacaaaaacaaatttaaaaagccagacatagtggcatgtgcctgtagttccggctagttgggagactgaggtggaaagatcccttaagcccaggagtttgagcatacagtgaacagtgatggtaaccctgtactgaagcctaggcaatagagtgaaagcctgtctctaaatgcaaaacaaaacaaaacaaaac

SEQ ID NO: 216 - DNA, 1334 bp, Homo sapiens
gttgcagtgagccaagatcacaccactgcagttcagcctgggcgacaagagcaaaactccgtctcaagaaaaaaaaaaaaaagcagttgacaaaccttcttgtttcttcataatactccacaaaatattatctaactttcaaatttctgccaatttggtaaatatgaaataatatctcctaagaacttaattttgcattcctgagattttcagttacagcatcttcccaaatgtttaggggccatcttctatttcctttgatatgacatgtcttttcaatcttttgcccatttcctccctataggaggaatgaatatcttctttataacaagtctatccaagagcaggatatatctgtctttattaaggttttcttcaaagtttttcaaaactgtttattcaataagttttataattttatctataagagtattacatgtatttttaggaatattattctgtactttatatccttgtactaagctgtaaatgtaaattaaaattacattgtctaactactttttctaggcatatagaaacagttaatgttgtacattcaatttttaaccagcacatttctaatattctcttattaattatagtaatttgagatttgcaggcctgagcatagcagagtagcttgtattggactaattctcctctgataacaactatagaaactagacaaaatataaacaaataattgactaaaagcaccgctgagcaaccaaagcaagcagaaactggaagaggcctgatccgtgaaaactaagctctgtaattctttggggtgccaggggagagaatccaagtagaaaggcacaattttactggtttaaggaaacagaggtcagagtttagggctgctagaagagttggaaatggaaggtagtctcaaagaagagccaggtggaaggaatgtcaaaatctctctaccaagtcttcttaaattgttggctgactcctaaatcctgcatgtgcagggagggtctccaggaattttataaaaagcagcagcagaaagctgtagctaggaggccaaatgagagctgagcagagatttcagcagagatttcctggatgtaggaacagagtttgcagttcaccaaggaccagcattcatcagttgctttcctctgaccttgccatgtcatttcagagattttcatgagctgggaagaataggtaggtgggcaattaggggtcaatttagctggttaagtttggttaccctaccaactatataatatgaaaggtaaaaatgcatttagactcaaacgatttctcattaaccacctttccacaatgacatcctgggaaaagcctagaggact

SEQ ID NO: 217 - DNA, 1256 bp, Homo sapiens
  misc_feature 448: n=a,c,g, or t
ctccatctgaaaaaaaaaaagaatactaaaatagtatggtggttaaaaacaagggctttggaatcagagatacccacttcctccattttctaggtgtgcaaggaagagcaattcacttaatcttctcaaacctcatcccttgtatgtagaccagaggtgattgtacctaccttacagtttgtgaggattaaactaaatgggatcgcgtatatgcagggctcagtgcagtggctgccctggcttcagtcccggaagtcctccctaaaggcagctattgttgtcgtcgttgttcgagtgatccgataccgcatagcgctgttcagtttttcatactctgtgatgacaggcgtgctgcttgaagaaatgtttgaactcgccttttctcaagttcattttctccaggtgatcctgcacacctgtgatatggctgatctcagggtatacattnctccggcacacaaaatttccttttcaccacgcacaattcatccctgatattagtcactgaacttggaaccgtctggttttgattggctagtcagggttcactgaggcaaattccttcctgagattgctccatatgttcaggaaagggagtgtttgtgagctgcacaggcagtaacgtagacatgaagccaggagacagcagcacgttgccattttcagctactcccagtgggcagctgggcaggatgattaatattttagcatctttgttctttctgtttagctataacactagagctgtttaaatcactctgaaaataacatgcctgacatttcctcagttaaaaaaaaaaagcaacttcaagtaataatcctctgcctattactgaggaagtgtttttggtgagaaaggagggaaaattagatgacttaggggagaaggataattctgaatagcttcatggtggagaatacattgaaacctaaaaagctcaaaggtgtgacccaaagtgtgtgtataagaggatgaggccgggcatggtggctcacacctatgatcccagcactttgggaggccgaggcgggcagatcatgaggtcaggagttcgagaccagcctggccaacatggtgaaaccctgtctctactgaaaatacaaaatttagccgggcctggtggcaggtgcctgtggtcccagctgctcgggaggctgaggcaggagaatttcttgaatccgggaggcagaggttgtagtgagctgagattgctccactgcactccagcctccacgatagagtgagactccgtcac

SEQ ID NO: 218 - DNA, 1138 bp, Homo sapiens
atggttttaaagccatgaggggacatgccaggtcatttgtgtgtaaacagaaggtatatgtgtaaactagagcaacacctaaaattgcatagcatttttctatttattatctaatctaatcgttaccattcctcaaactctgaggtagatagtgacatttatagagttggacttttgaaaaatcacacaactagtaagcagcagaactgagactggttcaatccagtctttttcttgtggcactacagctgcctcccagaaacagcaggccatggtggttagaacagaactctctactaaacggaatccctcaaggtttttctaattcctggagaatattctccagaaatgcatgtgcacaatttcactgcgttaacccatgttcacaactgcatctgatctgttacactgtttggtgtacttgagcactctggtatttaagcattttgctgctgttctctgtgcacagctggcataagtgtcactccctactaaatgatgaaaccaaaaggtagagagcaggctgctacttttatgcaaaacagatttgaaataaaggcttatgcaaatattggctttaaaaatgttgcctgtttcttttagcagttttagactaactcttcacattgctttttaccctgaaacaaggactgagaccttgagtcactcatttgtgatataactgaagataggagatttattgagactttaagagcacttcagctcattttttttaaccaatgaagatattttttccttctaaaaagagcccaaagctagaacctgctctttctaatttaccacaggttgagagatttgggggtagagggtcggataggcaacaaatcagatctctagaaagattttgggaaaatgtatttcattatttgaatatattaagatttgttgcaaaaacagaagatctggaaaggtgaggtctgtgagggcaactgtaaaagcaattttatttttgctccctttattatagtagggcatacaagcaagaaaggagccaggtgccgtggctcatgcctataaactcagcactttgggaggctgaggtgggtggatcacctaaggtcaggagttggagaccagtctggtcaacatggtgaagccctgtctctactacaaatac

SEQ ID NO: 219 - DNA, 2112 bp, Homo sapiens
cccgggttcaagcaattctcctgcctcagcttccagagtagctgggattacaggtgcaggccaccatgcccagcttatttttgtatttttagagatggggtttcgccatgttggccaggctggtctcgaactcctggcttcaagtgatctgcctgccttggtctcccaaagtgctgggattacaggtgtgaaccaccgtgtccagctgctgtttactccattttaaacaagggaacaggtagagaagggtcaggaagaaaatggcttcctgtttgtggataatttaggagcccaaagaggctcttgccttcattgcctcgctccttagagaggacggcttaccctttgagggtcgcttgaggaggagctgatggaagctgctctctgcggcctggcttgttttcctcctttgggaggaaatggctgcactgtcagggcgtgggaggggcatgggctaggcccttctggccctgatctgacagaggacaggcccccaggagcctcctggccatgctcctgcaggctctagggtgtggggtgtgccgagctctgggcactcggtccccgagtcttaggaagcctctcagagaaaacggcacttaccctgatgcggagcagcaggtctgcgtaccaggccgccaggcccatcatggaggggtaggcccgggccacccacgtatcaggcacggtgtcatagaagagagccgtggacagatcttccacgtcggtcgtgatggtcagttctccctaggagacacacagatgggtgtggggagccctgagctggggcctgggagagcaccagccccagtgcgtgtcatgagttgtcaacacagtgtggctttgtgctgcgcctctggagacgccctgcatcagggccgcgcaagcgcttcctgctaaggaacggtctagatgagctcccgggcttgttctggacctgccagagctctggagagggagcagtaccgtgctgatccggggcctgtgctaggcctggcttgccagaggcctgggtttctgctggtttcaccattccagccacgttccttgggcccggcttacccatgtttaccttcagccccaggttcagctccttgagcgaacggggcatttcgttggtcaggatgttcattctttcacattcttgaaaggcgactaccacgtagggggtcttttccgatgcctttgccatgatctcagccatgttgaaagtctccggaatcttctccaggatgtcgtccatcacggccttcacctggaagccagtccccggacagcccctgtcactgcaaagagcccaccccacccactgcagggtcagggagcctgcccaaaatgttcccagccccaagtcctggagaggagggaagaggcaagtagagttgccagaaatgcagggtcatgggtgcagccacacatttgacgaggagagggagccttggccagcggctccgagcattctgatctcactacaagtccctgcagccgcggccatgagcgcatcaggccacctggctcggtgcctcatctgttcattcccacgtaccagcctctggtcaaatgtagccagcggttgagggattgcgactttgtcctttacgtgggctttctgtagggaccatgctggtcacaccctgttaaggagtggcccacacagtgcagtggtcacctgcaccaccgtctgtcagccaattcctgatttcagtcattagactaagagaaagtcctggacctaatagcaataagggctcacatcaagaattcagtctttaccgggaagtcctgtacttagctagtacgtaatagagcctttccacattctattaagaagtacaggccaggtgcagtggctcacgcctgtaaccccagcactttaggaggccgaggcgggatggtcacctgagatcaggagttcaaaaccagcctggccaacatggtgaaactgtctctaccacaaatacaaaattagccaggtgtggtggcaggcgcctgtaatcccagcctgggaggctgagccaggagaatcgcttgaacctgggaggcggaggttgcagtgagccgagatcgtgccattgcactccagcctgggcaacgagagcaaaactccatctc

SEQ ID NO: 220 - DNA, 868 bp, Homo sapiens
agattatctgttcaaaatatgagtatctacttagtattctggttccttttcatggaggaggcacatactacttgtgtctagtcagccatctgtgtttcacatatttttaaaagttgtgagacatgtactttctagtgtatttgttttattctggcagagagtacaagttgtataaattgtacgagttcagtaaacatgaagcacatctatttttattttgtctactaagatggtacatctaaagtgcttagcaactataagtagaccatggtaaaagtgtccaataactggtagtgattattatcatattgtcattctttcgttgagcaaaatgttaattataagttattttattatagaatgcattcattgttataaattatatttgttgaataaaagcataatctgattttttttcccttggcagcaacttgagttggtggaaccaagtggctggattcatgttcccttaactgacaatcataagaagccaactcgtacattcatgatacagattgctgttctagccaatcaccagaatggaagagacacccatatgagacaaattaaaatatacacaccagtagaagagagctccattggtaaatttcctagatgtacaactatagatttcatgatgtatcgttcaataaggtgactttaaaatgagacgaaaatcattaaacgtatctttgttttatcctgtatttaaataatatatcatgtacctttattgaacaaggcatccgttatatctaattttgtatatgtttaaaaatattttattgtaactttgacaaataaatttggggtcatattatctttattttctttaacatgtaataaagctcacatattttacattacc

SEQ ID NO: 221 - DNA, 2903 bp, Homo sapiens
caggaattttgcatataggtggtggatatgattgactgcccaggccttgtgtctacacagatgaccattcaccttctgtgagaaagatgcaggagacaaagcacaggtggccctaccattgcagcggctcacaagagaccttcccggcctcctccatgtgtgacacagcgaatcctgccgtgtggtgcaggcagctctctgcatgcctatctgggaggagcagatattttggagttaaaacctgccctaactctcttttttttgaagacataatttcgctcttgttgcccaggctggagtgcagtggcacgatcttggctcactgcaacctccgcctcttgggttcaagtgattctcctgccccagcctcctgagtagctgggattacagtcacatgccaccatgcccagctagttttttgtatttttaatacagacggggttttgccatgttgcccaggctggtcttgaactactgagctcgggcagtcctcctgccttgacctcccaaagtgctgggattataggcgtgagccaccgcgcccgccccataactctcctttagtcgcagttcataccttgccaactttcaaaacacatcgaggcaattacagacaagcatgcatacctatgtgcatgtaagcatgtgaacatacataggagtatgaagacttacatgcctcttggatacacatagccttctctgtgcgtacacgttacttccctcagtgtgtcctgggtctcccagatactatcttacagggaaaaaaactagtatttagggatgattattgtatttgtttatgtcattgtgggacagttaaaggccattgagatcgcctgctcttttcaggacttcttgttgggtccagctgtacagattcaaggtagactacgtcctgctaatgctgctccacaccctgtgggaaggtttcagtgctaaatctagaacaggtggtcagtctcctaactgaatttgaatccagatttttgtcagatgcatccgtgtgtcttcttcttaaatcagttgtgaacagggctatttccagcctctcgggttcagggactgcctctgtgccaccgcagactggaagacaaggactctgcccaggccttgggatagccttctgccttcactggggccttggggggattgtcatcaggcaacactcagctccatggagcttacctgggtttgaaattccacttggtagacattcctctgtgttgaagtatttctttttttttggcataatgcctcctagcaggtcagttagttggttcttcagtaaagtaatctttctaggcccacactggagacagagtggggaagacagctagtgtgtaacaagcatgctctaggaggctggcactagaatgttacttatgtgccctgaaatattcattctgtaaagtaggattatttcactgtagtagcatcctcagtagtattcttattggtaatatgagtgcaattgatactatgtatatattaaatatacatacagaaaaaacacatgaatagaaatgggtgtgagccagtactagttattatattgtatgtagtgtaatctagcgtatattagtggtactggtactattattagcagtattcctgttcatcttgtgtaagcctgaagaaagcaggcacctgcaggctcactatgtttctgaggctgtgccctgagtaagtgccgagccgggagttaattctcaggtcagctttcaccatcccgtgacagcctgtgcattaaatgttctgttcttacctgggagcttcacagcagcatcctggccaggcatggtggggattcatcccactgggcagtggaaatgtccttaatactagtgggccatgcagtggactttgtcagctggtgctggcttccatgttgttgggaacaccgagtaatgatgccttgtgctatcgaatggaattgaccattccaaggatatatttagattcaaatacgtacatttaaacagaaaacacaataatacagatttcatttctctcctgagttctgaatttccagatcacaactccagacataactccagcagccttgagaggaggctgcccatagtataatttagtgagaatgacctgcaagcctttctcctgttcacttaggtctccacaaaagcctttgttcatggaatgagacctacacagtgtatgtttatgcggacctgatacaaacttactgttcatacagtatgcactctaaaaatctcttttttttttcctgcagatactgaacggctgtattcagtggtgtttcaagaaatatgtaatcgctatgacaagaaatacagctgggatgtaaagtccctggttatgggtaagaaggcattagaggcggcacagattataatagacgtcttgcagctcccgatgtccaaagaggagctggtggaagaaagccaaacgaagttaaaggaagtgttccccacggctgcgctcatgccaggtgcggttgcctcgctgtttgcagggttatgtttgtgactattagcaatggttttgtaaatcacctttaaagtctagcatagggcatgcttagtttgtcctcttttcttcagtatctaaactaagtccctcctggtgctcctgaaagagtttggctgatgctgtgggatgctgtgattcaattttctctttaaaagcttcttaaaataatatgcgttagtttcagtgatttctgggttccaaaaacatttgagtattgtttatattactatatataaagattatgttaatgacagaatgtcttcaaagtttaccttaatagatggttttgcctttttcttttcaaagtcagatataggattaatatttcagcaactattcaaactttatcaaattgataagcggctaaatctccccaaagacgcttaatt

SEQ ID NO: 222 - DNA, 766 bp, Homo sapiens
cctgtctctactaaaaaaatacaaaaattagccaggcgtcgtggtgggtgcctgtaatcccaggtactctggaggctgaggtgggagaactgtgtgaacctgggaggcggaggtagcagtgagccgagattgcgccactgcactccagcctgggcaacagagcaagactctatctccaaaaaaaaaaaaaaaagatgcggctgctgtgggtaccccaggattcctggttatgccccaatccatcctaccactgtcccttcttctccctgcagggtgccgacccccacatcctggcaaaagagcgagagagcgccctgtcgctggccagcacaggcggctacacagacattgtggggctgctgctggagcgtgacgtggacatcaacatctatgattggaatggagggacgccactgctgtacgctgtgcgcgggaaccacgtgaaatgcgttgaggccttgctggcccgaggcgctgacctcaccaccgaagccgactctggctacaccccgatggaccttgccgtggccctgggataccggaaagtgcaacaggtgatcgagaaccacatcctcaagctcttccagagcaacctggtgcccgctgaccctgagtgaaggccgcctgccggggactcagacactcagggaacaaaatggtcagccagagctggggaaacccagaactgacttcaaaggcagcttctggacaggtggtgggaggggacccttcccaagaggaaccaataaaccttctgtgcagaatg

SEQ ID NO: 223 - DNA, 1586 bp, Homo sapiens
attttttatttaatttcctattttcacataagttatatttaagggaggagggaattttttttaaacaagcttaggtcctttcccgagctgcattttctaagttgggtcatcgtgtcggctggttgtctgacgagcatcgttacaaacaccatgatgaggggtttggggttttattttgatgtcttttcttttggtcggaagtgagtgaaggagccaggtcgccctgaaggttttccaaagggcttggctccagagccacctggcagactgcccgtggccctgctgtcgggccccaggccgttgtcctgctctgaccacagagttttaatgttttggttttcacttcttttaaactggacaacaaatccagcatttcaagtgccagaagtataactttctaaggagagaagggttgtcacattataaaatctttaggaaaatgtgaactggaaaacgcttcggtcagttttagtgacatagcctgtgatgatgggtctggtgactattattgcggaccgtggtacccagttttaggaatgtggagaaaggaattctgttgattccgttgaggaatctgtagcgtatgcattcgttctgttaagagcaaatctaggagaagtgcttcagctgcccagtgcgccgtggggagtgttttaacggatcgtgtcgcaggagagcacagcccagcgttggggccgggaccgctggcgcccgacgtcggaagcatacaggtatactatgcaagtgtattctgccacaacaaccactgtctttgttacctttttttgaacaagaatatatccatcctgcctaaccctgagtttttggagcaccacagttgtcctgggagttggttgcatcttgtaggccatctgacttcctgtttttaaaacgggggtctggtcttgctaaacactacaggtaggttggtctttgaagtccactagtggagaatgtcaagacaagatacttattaccatgacatctgatgcatgtgcagcagtggggagttctagattgatctctgaatgtgatcgacgcccagcaaggacaagctttaaaatgtctgcggtctgcccttttgaagcaggactggctcactctgtcattgggagctgtcagctgcgactgcaggttctctaggaggcattccagaatagagtagcacactgtgtctgcagttctcgatgaccgaaagttatcaaaaatatttaaaatatttaaattgtgaacctattgataaagaatatttataaaaactgatctgtaggcctgtactaatctctacgcattagcaatattgactgtaaacccacattaaggaaaccactacgggtctggcagtgcgtgtcccgtggggtgtgcattttaaaactcgattcatagacacaggtaccatgttccatttccgtcatggtgaagcaaatgaattggcctggctaccactgtggtcgcgtgctacaggtttgacaaaaagatatcatgtttcgatttttttgtgtgtggacaacaatatggaagctaaaattgacatatttttatgtaaagtttttctattctttgatttttaataaactttggaaacc

SEQ ID NO: 224 - DNA, 1045 bp, Homo sapiens
agatttaacattggctaaaagatggtacttaattcaagaagctgtacaaagatacctgctctctggtgttttaattctgcatttgatgatctatatcatataaaagatgtgctgtatctcagccttctcttgagatccatgacttttagtatacacttgctaatatgtaactgtcaagaaggaattgatgcgaatttatctttttacagtaatgtacatggtatataataatcagccatttcttgtagggaaaaggaaatggagaattttgtcagtgttacatgggctcacagaaacaatttaaaattactaaactttcaccagcaatgggctgtaaattcagactatcggccagaaatgactatggtacaagtggttttagtgaagaagtcttatattacacctcaggctgtgctccttctatgccagcaagtcctgtattaaccaaggctggaattacttggttatccttacaatggagtaagccctcaggaacaccatcagatgaaggaatttcttacattttagagatggaggaagaaacttcaggatatggttttaagcctaaatatgatggagaagatcttgcttacacagtgaaaaatctcagacgtagtactaagtataaatttaaggttattgcttacaactcagaaggtaaaagtaatccaagtgaagtagtagaatttactacttgccctgataaaccaggcatacctgtaaagccttcagtgaaaggaaagatacattcacacagttttaaaataacctgggatccaccaaaagacaatggcggagcaaccatcaataaatatgtagtggagatggcagaaggttctaacggaaacaaatgggaaatgatatacagtggtgctaccagggaacatctttgtgatcgactgaatccaggctgtttctatcgtttacgagtttactgcatcagtgatggaggacagagtgcggtctctgaatctttacttgtgcagactccagctgtgcctcctggcccatgcctccctcccagattacagggtagacccaaagc

SEQ ID NO: 225 - DNA, 2153 bp, Homo sapiens
  misc_feature 2113: n=a,c,g, or t
gctctgtctcggcctgagcccgcccccgctcggttgccgtggttgcgggccctgcccgcccgccagctcgctgacagcacgactcagggcggagggaagtaggtccgttggtcggtcgggaacgaggctcaggcggccaggcccgcgcggagccgttgccatggcagccgccgccggggacgcggacgacgagccgcgctcaggccactcgagctcggagggcgagtgcgcggtggcgccggagccgctgactgacgctgagggcctcttctccttcgctgacttcgggtctgcgctgggcggcggcggcgcgggcctctcgggccgggcgtccggcggggcccagtcgccgctgcgctacttgcacgtcctgtggcagcaggatgcggagccgcgcgacgagctgcgctgcaagatacccgctggccggctgaggcgcgctgccaggccccaccggcggctcgggcccacgggcaaggaagtgcacgctctgaagagactgagggactcgggcaatgccaatgatgtggaaacagtgcatcagctgctaagaagatggcgcagatccctgtgcagcttgatgacaagggccgcacagctctacactttgcctcatgcaaatggcaatgaccagattgtgcagctgctcctggaccatggtgctgatcctaaccagcgagatgggctggggaacacgccactgcacctggcggcctgcaccaaccacgttcctgtcatcaccacactgctacgaggaggggcccgtgtagatgccctggaccgagctggtcgcacacccctgcacctggccaagtcaaagctgaatatcctgcaggagggccatgcccagtgcctagaggctgtgcgtctggaggtgaagcagatcatccatatgctgagggagtatctggagcgcctagggcaacatgagcagcgagaacgcctggatgacctctgcacccgcctgcagatgaccagtaccaaagagcaggtggatgaagtgactgacctcctggccagcttcacctccctcagtctgcagatgcagagcatggagaagaggtagcaagagaggctccctgccttcctgccactgccccaccctgccccactgctgtctcagtaccaagaaaaagcccaacatctgggacttggagctgcacttgtctggtgaggaccttgccctcacccgcagatgccgtggggcagagatgctctctctccacggcctcagagccactcccagccacagtttccagcatctctgtggacagggaccacagctcccagcttcttccagttctcgcagcaccagaccagcctctgcagctgcactttcagtccgcagacctgcgctatctcagcagacctcacttgccccatggccttcatggcgcgctccaggcctcagacccttctctgtgttccgtcctggccatgggcttgttgcagtcagcaggtgtgggcttaggcgggcaccctgtggccaggggtactgcgtgaggccctcagttggtcctgtgcctctcaccagcacttagacagacacgtcaccagactttcaaggagatactgcagtgagtttctctggttggaaggggagggttggtgagtcccagaccttaaaaatacaaggttaagagggaccccaaagcaaaaaattccaacccttttcctcccagtcattgaaacaccaaaactattataccggagggtgtaatagttttgctgcccagttgtggtaggccagtagtggcctcccaagatgcccatgtcctaatcccaggaacctgtcaaaattaccttgtatggccaaaggggctttgcagatgtaatgaagttaaggatctttcgccaggaagattatcccagcttgttcaggagggcttgatgtcctcacccgggtctgtataacagaagagcaggtgacgggagaggaggttggaggtgtagcgatggagcaggaaactggagttgaggagggcagctcaagccacagagtccaggccacctcagagccaggaaatgcatcctcccacagagccctggaaggccccagccctgctcccacctggactggctcagtgaggctaattttataattctggctgantttagaactctaagggaataaatttgtgttgttttaagtc

SEQ ID NO: 226 - DNA, 1704 bp, Homo sapiens
  misc_feature 1679: n=a,c,g, or t
tttttttttccatatttcttggctaagcgattcatctgtgaggtttttcacaaaattgttgccatcgccaaaaatattccatttactgaaaaaaatccacatataagtgtactcacgcagttcaaactaatgttgttcaagagtcaactgtataaaaggtattaatatgtctggaaagagatatgtttccaatttaacagacactaccaatgaggagaagagttgggctaggcaggaaacttcaaattttccttttttactttatatattctattgtatctcaacttataacctgtggaccacgtttattagaagaaaatgcagattcctgaaacttcctgcagaccccatgagtgacaatctcagggagatggagttccagagtctgctttttttcatagatgtttctttgtcattcctgtgtatatctgagtttcagtagcactgctaatcaattgtttggggttctctctccttcaccagcatgttcttgcaaaactaaccaaacacatacaaagcgcaaacagtacaatagtgcactgcaccttcatgacccttacctgttccagcctcttcctacctcttccacatgtgatatgtgtgtacatacccacagacagaaacacagagacatgtttggaagccagtgtggatgccctgtgatctgtgtgtacacatgacaagtgcatacacacgcacataaaggaacccagagacgtgtttggaagccagtgtggacaccctgtgatctgtgcgtacacatttgacacctgcgtacacactcacagacagaaacacagagatgtgtttggaagccagcgtggtgccctgtgatctctgcatacacgtgacacatgcatgcacaggcccatacaggagcagagagacacatttggaagccgatgtacgccctgtgatctgtgcgtacacgtgacacatgcgtacacacccactgacaagaacacagagacgtgtttggaagccagtgtggacgccctgtaatctgtgtgtacacacgtgacacatgcgtgcacacccactgacaagaacagagacccatttggaagccagtgtgggtgccctgtgatctgatctgtgtgtacacatgtgacacgtgcatccacacccactgacaagcacacaagagacacatttgaaagccagtgtggatgccttgtgatctgtgtgtacacatgtgacatgggcatatgcacctacagacagaaacgcagagatgcatttggaagtcactgtggataccttgtcatctgtgtgtacacatgagacacttgcatacacacccacatacaggaacacagagacacgtttggaagccagtgtggatgtcctgtgatctgtgtgcaccgttacacgtgtacacaaccactgacaagaacatggagacacatttggaagctagtgtggacgccctgtaatctgtgcatacacatgtgatacgtgtgtgcacacccactgacaggaacatggagacccatttggaaggcagtgtggatgccctgtgatctgtgtgcacacatgtgacacgtgcatgcacatccacagacagaaacacagagacacgtttggaaggcagtgtggatgccctgtgatctgtgtgtatacgtgacacatgcatgcaaacccactgacaagaacacacagatgcatttggaagccantgtggacgccatgtgatcttagaaa

SEQ ID NO: 227 - DNA, 2267 bp, Homo sapiens
gtcttttttaaaaacttcagatatgggttggttatttctctccaatgcttttttaatggttctgatataaagtgaagggattactgttttcattctgttgccttcagtcttagttcacttgcacatggattcacataaactgaatggtgtaatgtctgggcaaccaaaactgttggcttttgagaaaactgtcaaatactttaacatcaaactgttgcaatgcaaggtatttctttgattgttcttcacaaaatatggttaaaccaagtatatatcatgtagctagcttcagtaaattgtgttaactgaggcaaatctagtctacataattcacagtaccactattttattttaatttgtaaagccttaatatagtggtaaactgaataaaagtaaataattattattagaatggtaactaagtcattaaatttttttgcagaactgaaacttgtatgttattagtttattttcttagaccagtgtaataattgactgtaaatagaaatataaatgtcactttacagttagatgtatcacagtcgtttcaggagaatttttcctatattgttaccttgattcattgtttaaaattggtaggatttgtatagatataggatagtgttttatttatactttatcataagccataatcattttaagaatactttattggatagattttagtactttttaaattctaaagttctatttttcttttcacttccccttccttccccttataagatcatttccatgtctttgttggtgatctcagcccagaaattacaactgaagatataaaagctgcttttgcaccatttggaagaatatcagtgtctctgaagaatggacagaattgccctggctaactacaagctacgggtcacagtggataaatagatgcccgagtggtaaaagacatggcaacaggaaagtctaagggatatggctttgtctcctttttcaacaaatgggatgctgaaaacgccattcaacagatgggtggccagtggcttggtggaagacaaatcagaactaactgggcaacccgaaagccttccgctccaaagagtacatatgagtcaaataccaaacagctatcatatgatgaggttgtaaatcagtctagtccaagcaactgtactgtatactgtggaggtgttacttctgggctaacagaacaactaatgcgtcagactttttcaccatttggacaaataatggaaattcgagtctttccagataaaggatattcatttgttcggttcaattcccatgaaagtgcagcacatgcaattgtttctgttaatggtactaccattgaaggtcatgttgtgaaatgctattggggcaaagaaactcttgatatgataaatcccgtgcaacagcagaatcaaattggatatccccaaccttatggccagtggggccagtggtatggaaatgcacaacaaattggccagtatatgcctaatggttggcaagttcctgcatatggaatgtatggccaggcatggaaccagcaaggatttaatcagacacagtcttctgcaccatggatgggaccaaattatggagtgcaaccgcctcaagggcaaaatggcagcatgttgcccaatcagccttctgggtatcgagtggcagggtatgaaacccagtgaataaggactccagaatctaaagccagtggcttgaggctacagggagtgtagtaaagccgttgtttacttaaagatttatcaaatcagtcagtgcaaatgtcagatacaatgtatttatttaaaagattcatttttaatcatgaaattacttatcatccacattgttttaaaaagaaacaagatgctggatgtctgccaatttttgccttcattaccttttttgataaagtttctcagatccttgtttcaaacacaaatgcagggattgctgccactttttaactattaagaggcagaaaattgcacaatattgaacttttttccactgaagtagtgtgcagttctagtttgcattcctgatatgatttaaaacatgtaatataaagatgttaaaaaaaaaaaccaaaactgtgcagagtctagaagttgtttgtcatcttcagcttgtgcacaattctgttttaggttaaaaaaaggcattgtttgagctgtcccatctccactgttatccctttggggttttttaatataaattattagtttacatcatttttgtatctacatcttttttcacaaatttgtcttgccttattaaagttctgt

SEQ ID NO: 228 - DNA, 2682 bp, Homo sapiens
  misc_feature 639: n=a,c,g, or t
tgttctccttggagcccctgggggctcctagtgattgacttcctttctgagtgcacgggaagcagctgttcaataatccattgtgacgtttggccagacaccgacagagcttgtctccctgcgacccccttgtccaaatgcagggatgacctttcccctctgtgaccaggaaggatgcaattgttgggggtttcttacattagttctctccaggcctaaagacgccatcacatctagagctgccggcggcctctcgccactccctctccttggcttcttcataatgatattgatttttcctccatttttagaatccatctccttgagggaggagacagaaactccatccctctgcacagaaccatttcaaaaaggaacagggggttgggatgaggcccagctggcctaggagaggccgcctggctgggccgaacactggctctggcctggcctggtcactgacccttgcctgggtcctcaggaccaggagaagaagggccgtgtcttttcagatcacagaacactctttggcccctagtcatgtgtcaggatgagaggggcggtctttgaactcccatgattcacttgaatgttgcattttctagatatcatgacagccagatctcaggccatcattanaaagaaagaaggtgaaattccacacctgtgggttacccaccagcggcagccctctggctggagatgtatcttgtggctcagctcctgtttgtgttctgattgcagtgccatcagggggacgtgtgtccactgacccacagaggcaggggcagctggggaacgtgctaggagaggaggggcaggcaggaatagaccttgtctcccgagtcatcccctgagcaggctgagccaagagtggctgactgaggattggctgggcacaacgttccattcgccgtgtttgaggttcacccttggccaggtgcgtcacttgtcctggttttccagatgtgaaggtggtgacgcaggctggtatgagatcctagatgtcagagcatgttttagcttatttaagatcctttgatggttcccttctgcaacaggctcggtgtgatgtggtggtaagtcaaggccctggagcccagacgtgattacctggccactctcacttttgggggacacatgaaacagcctcctgctgtctccactgtcgcccctagagtgtattctctctcctgctcttcctgaagtgcagacctcatcacacacacagcctcctgcttacgagctgcaaaggccctcagtgctcatgggatcaaggtcatagcttggcttgcaagatcccaggtggaccccagccctttgtctggcttcctccctgtctacgcgctgatccccgcagccccacactccacccactcagcacaggctgttccctcggcctggaacaccggcccttggtacctctatacccctgttctcctgactcctggccagttgctgctgaggctgtgaaggtcctacacggctcagcacccggaaactcccccaaccctctaggatgagctgaggccccatctgggttccccaggcctttgtgcctgtcctgccatcagcccgcatcatagggtggcattgtttctcctggttcatttgtgtccccactaagtgccatgccccatgagggctgggatggttgtcttgttcacagctgtgtcctcagtgcacaggacagggctggcctggtgcactgtgagttgccggctggtggacagatgcttggaggatgtgtgacttggggcagggcaactcctgagtcttgatctccccctctgcactggggtcatggtgtcaagtgcagggggaggggagggaaggggaacaggcagcatggggaggggcctgcagaggtgtctggcagtggggaagctgtcattggccatagtctggagcccacatccctgtactgacacgcagctttcagctgtagccagaactgggtctcagccagagtgggcagaggtggccaggagacgagacagtgcagggagctgggggacagggttagggggtggtgagaaggtcccctccctctgtcctccttgaccatgcatccttgctcatctccaccggctccaaccaggagcagtagcccgggagccctctccttcttctggtgcaggccgtggtccttacaacctggactctgcatgagaatcacctgggagctgtgaaatgtcccacacccaggccacgcccccgagtagagacatctgaccccctggcgtgggccccgggcatcagtagttcataaaactcccaggagattccagcgcatggccaggtttgacagccgtcattccaggtggttcttggtgacctggtttttcctggagatgctcagcagcctgcaggagcccgccagccagcgcacagtgagcggctcgatgggaaatctccccttctccgcctccctccacaaaaatcctcaccagaaacgaggaagcacttctttaaatggttttgttttttgaaagagttgcacatgcctttggcaggaactccaggcagcacagatgggtacacagtggaagaaaaatcagtcctggccgggcgcggtgtcacgcctgtcatcctagcactttgggaggccgaggcgggcgagtcaccggaggccaggagtttgagtctagcctgaccaacatggcaaaacctcatctcttc

SEQ ID NO: 229 - DNA, 1612 bp, Homo sapiens
gtataaggtgtaaggaaggggtctagtttcagttttctgcatatggcttgcctgttttcccagcaccagttattaaatagggaatcttttccccattgcttattttgtcaggtttgtcaaagagcagatggctgtagatgtgtggtgttatttgtgagacctctgttctgtcccgttggtctatatgtctaaaaagcagaagtataaaagagctagaactaatcttaacactagttccaccagtgagtaaagcaaccagcagcagtgaagaaaatggcagattttcctgttggtgtgagtggactggtcacaagaaagtctccatggggtagcagaatgttgcattgcaaatttagaaatgggttgatattagggggattgtttatgttggagtgctacaactatactcaagccctgagtgattcaggttttggtgacagatgactcactgacaagccttttttggcaactgctattaatgaaatcctgtggtgacaataatgaaacatttgggagggtttgtttgattcttgttgcaataagtagttctttggaacaagaaagaagaaaactgaagggttagcagttagggaagaataaccttttaagattctttttagctgctagttttacagaaactttgttctgaaacaagattgcattttctggcccttcactgcacttttatttcttcaactttaatattttggtagatggtttttcctgattttggccatgctttttgtatatgctgaaattatgaaaatctctgacttagcagggctgcagcattgacagaacaatggaatagttttcattcaggctttggcattgtggctaagcggagtgggtgtcaacttgtgtactagaactttgaaatatcaggaagattcctttgttctcttatgggtcctcccagctagcaagaatgtgcctaatttctttctttggcttaagcctttgatccctagtaaaatacttatacaccatgagtaatcatctacttcatgtcattgatatgattcagatcctttgctgaatgtagatttttgctaaagggaagactgcagaagggccctaatctactagggatggacaacagaaagatgcagacacatagggagaagagcctacttacctacttaattttaagactgctccttttttatatggattaagaactcaggttctccctaggatatttttagaggatattatctaagctgatatttttggcagtttttaaatcatatttcagtatttttgaaaataacatttatgataaaaaaaaaatatgtactggccaggcacagtggctcatgtctgtaatcccagcactttgggaggccaagatgggaagatcgcttgagcccaggagttcgagaccagcctgggcaacatagggagacctcatctttgccaaaaagtaaaaaaattagccaggtttggaggtgcatgcctgtagtcccagctacttgggaggctggtgtgagtgcactggtcacaaaaaagtgaagcaggagtatcacttgagcccagcaggtcgaagctgcagtgagccgagatggcaccactgcactccagcctgggtgagagagtaaaaccctttcac

SEQ ID NO: 230 - DNA, 1512 bp, Homo sapiens
aaaaaaagaaaaaaaaaaaagaaaagccatcctgggccacacgtagcccatggggctgcaggttggacaagcttgctttcaagcttcacaacctactctgctcttttgtcccctcctcccatctgataagtttatagttacaagttttattgttgtttgaggtagtccatttcacactttaattactagttgtgtaattatgttttgcctgagttcccatacagctaatttgtttccatgcttccatgcaggattttatcagaaactttaaagtatcctagggaatattaccagtgcagactagttgtatttgtgcttgatgtattctctgttttaatgcattgtgttaaacttcctttttctgagacaccatgtaccataatttcttaaataaactgaaggcacacgcattacatttcaaatgtctcataagggaatataggaacagagaactaaccatgtatgtaaggaattatgaattttatggaattaatgtataaaatctcttttatgtgtattttataaggtgtcttggagcccgtactttaaaattctcctattttaaatggatgtctgtatttgaaactgaccagatggcctagataaagtcttgagtcataatattagggcctttcagaaaaatctaagtgccagtagattttcaaacaaaataggttagcaagggaatagaaattgatctttggcttgaaataaccagtaacagacttcagtgaatgttttgtggtgtgagggctatgtttaagagggagctctagttgattcgtatgctagaccacagattctaggagggtgggacccattcattgcgatgaccctgcatcttgttccgtgcctgccacatggtagatgcttcgtgaatatttgtggaatgaatgcatactgtggcctatgggactcaccatggtgataaacggtaaaacatgcacatcttcaagacgtcattttaagtgctttggggggactgggcataagataaaagtaggattgaagatggttgtcttgcagagatacatttcagccaggaactgaaatgtgggtaagatttccgcaagggaaggggtaggcatggctttccaggaggtatagacaagcagataacaagtttgagcaacaggaagatcctgtggacttcatggcttgtatcttgtcatatatgaaggtacatcccctgtgtgtatggctcagtccatgctcatattctttcctcaaagttgatgcacagggccgggtgcagtcctcagcactttgggaatccgaggcaggaggatcacttgagtccaggagttggagaccagcctgggcaacacagcgagaccttgtctctacaaaaaatttaaaaatgtgctgggcgtggtggtgtgttcctgtttttttttttttttggggggctggggcgggtgggttgcttggggccgggggttcagggctgcggtgggctttggtagcgcccctgtgctccggcctgggtggcggggcgagtccttgtctctc

SEQ ID NO: 231 - DNA, 3163 bp, Homo sapiens
  misc_feature 3047-3049: n=a,c,g, or t
aaaacacagaatcttttccaaggcccgctgggtatggtgtgatttgcttctagcacttctctttgttcatctcctacagcttcatcccatctcctgccatgggccctgatgctcctcaaacactcaagcatatgtcctccttgtagctcctttctgttttttcttgttgctgtttttgttttagttggctgtatcctccgtgagaatgttcattccataaagaacaggattttttttttcccattttgttcactgccatctccagcctctcgattcccattgtactgttgcctctcttcaatttgagaaatgcagacctatagaatgaagttcaggctctttatcatagtatttgggtcttctccacaatgcccagttccctgtctttgggccattactgtttgtatactcacaggaaccctagctacacccagttataccatggctatgtctttgtccccatggctgtgaaggtaggacatgctgaaaagctctttcctcatttttacttgttaaaggtctattccttatctttaatgcccaaatggattgaacaatattttagatttctcccaataaacatttatcctcctttcctctgaaatttgctgccacttgtatagcatttatcacatttcgcctttgtaagttatttgtgaacatctttctcttttgttattcttgtaaaatccttgacgatggatttcttttcatttcagatctattgttgcatccctagttatcaccttttacacagtgtttagccaacttatttacaaatagaaacagccttaagttcatatttcaaatgatctcaattagtgtagaaagcttttattatttcctcttgtgtgaattatttacatgaacaagaaataacatgcatatgacaacaaattaggatatgttattttcatattaaatgtccctaagataataagcaatgaattattaatgtatcacacaggcatatcttttattttattttttgttttttcaaatgtaaaaacaaaactaaatttgtcctaccagaagctcatagggtatgtttaggctttcagggaaaataattatttttacttagagatcagtagctaaatataaaaaagaacttaaaatttgcattgtgccccccaaaattatgccatgtatttggaatgtgtatttcatatatgttggagtttaaaatatttttccagcagtatagaaaaacagaagaaaatggacttacatttattgttaaagcaacgtgtattttatatttttatatttaaaatgcttttgattataatagctaaggcaattttataatgcagggcccaagtctcatttcctttctgctcttccaccaggtaagtagtacttcttgatttaatgcactgatattttctataaagtgcttagcatagtactatgtgcttaataggtagttagcacccaataaatattagcttctattattcataaagaagtgaccttctcttttcagagtccttcttggcctgtcatttatcatattattgccttgtattatttttatgtcttttccagctaagtgtcctttaatattgtagataattttgtacattgtaaaggattaataaattatttatccactgaataaataatgaacttgtgaacattcttttaaaatttaagtagctctgaagtttgctcatattgagcccaaacatggcggaaacttctgagcatagacaagttaatgccataaataatcccagaaaagccactggacacagaacgagtctctggggatgaaccagaagtcacatttgcctgcctacattttccttgcggaggcagttctactaaattaacaggggatatattagcatgttcagagacctctaaggtacagtaaaatccatagaatgcccacttccactacatttgatagagttacccattgggttaagattagttactcagtttatttatgttgtaaatgacttatttggccatttgtttggaaaggtagaaagagcagtgaagagaatgagagactgcagggcagacaaacgcttctgttttctgactgtgcactcacatgagagaaagagagcctttcaaaaagtatttgcttgggtgcttcacatgaagatgtgagctgctgaactctgggagctggcagccagcctgaatatgtcctttaaagtgtacctacctgttaaccactgcagtgcttggaatctagtaggcattcaaggaaacttggatgtatagatgacaaactggaagtgacaatgttccaggtagaggagatagcttgctttttatggatggcttagttgcaggcctccattgggttctcccaaggctcagtgttttgcctggaagttaagccattttcagatctatgagtgcataggtaatgtaaccattacattattattgttctatttcatttacttccaagtaaaccccagtcttccttgtcatgattatattgattgtattcattcccacaatgattcaaaaatactgtgtgtctcagaattgcatggccctccattggacaagtggggctaaaatgtaagcaaggtgggcttcctagagaagcctacagcctaagggggagatgagacctgcttacatggctgtcagtacaggacagaggaggcgcgtgctacacagtaaaggacttcagaggagggaaatagtctgtacagtctgcaggatgccaaagcacttcagagaagaagttgcattttaagcaagactttgaaggagatgttggatttaaacaaagggactgggttggaggtttagagtgaggacattgaagagaaagcaacaggcatagtaattggtaactttacagtcatatcaattaatttatgttaattaaaagtgtaattcaggctgggtgtgatggctcactcctgtaatcccagaactttgggaggcctaggctggcagatgacatgaggccaggagtttgagaccagcttggccaacatggtggaaccccatctctacttaaaatgcaaaatttaaccaggcaaggtggtgcatgtctgtaatcnnngctacttgggaggctgaggcacaagaatcacttgaacccaggaggtggaggttgcagtgggctgagactgccccactgcactttggcctgggtgacagagcgagaccctgactc

SEQ ID NO: 232 - DNA, 2376 bp, Homo sapiens
  misc_feature 2103: n=a,c,g, or t
ctaaggaatcaaaactgtttgatggccctggatagaatatctctattttgagagtatctcgaatttatcattaagaaaaaaattcttcaatgtttaatcaacaaacaagggcccagaagctctctgctaatcatacaccaatttcttactatgaaatccatcagaagtttaacatggtctacttcctttatatgttcagctatataactttgtggcacacactgtccttattatccacaaaatgcagataatgtcaccctaacaagcctaatgttttactgtccacttgctacttagtaggtaacccaaaattattaacttccctaatttttggaaattatttagagtccagaattctgcagttaagtgccagctgtattctaagagctttcagacattaaaaggtaaggaagaatactaatttataatttagaaaaatagccctacataaatactctacaaatctttaaattttataaaaagttaacatgtttacattttaagaaaatacatttaccttcagttgtacatcctaaaatgtagtcgtgttaacttccattaagatacagttctgtgtaattcttggacattttacctcttaattgctctgctcattgtaatatgaaagtaatacctaccgtacaaagttactagaaagtttaaatgaagtaacatatgtaaagactcttgtaaaattacaccctattaatatttggtaggcacctcaatgtttaattttcctaatacagcaataataccataacttaacagaagctgccctccttataaaatccatattttgggaatgttaaagggatatgtagtttaaagggaattattctttaagctatggaaactagtactaggttgaattgttagtcgtgtctaaaatttacgtatgtcttcttacgctgtgattcacaaaatgagacacattgccgtatcgagccgcatccactgtgaattcatcagactcatagtccagatcaaagagatacgtgattcccttgttgtcatagaactgtcctcgtctttcagcttcttcacttgtgattacctaaacagaaaaaactgtaagtatattacgtagctactgaaccaaagaagcattcatctacctatctactaatatgcgaatacctacaaatatttaaaaagtaagaaattcaggtgtcatcaaagcaaacattcacacaaactaagactcagatgcaaagaggtgggaaaatgaggggaagaaaaatgataatgcaaaagactgatgaccttttttttttaaacagggtctcactctgtcactcaggctagaatgcggtggtgccatcatgactccctgtatcctttaactcctgggatcaagcgatcttcctgcctcagcctcctgactagctggatcacaggtgcataccgccatgcccagctaatgatttagtttttatagagatgtggggtctcactatgttgcccacactggtctggaactcctgggctcaaagtgagccttcagccttgacctccccaaagtgctgggattaactgtaactgggtggattatgactttttaaacagggatttgagcagtacattggaacactgcattactttcattataattaggatgttcaaaaagctatacaactatagctctctacaggacacaactgaatgttaaggactaaatctgcaagtatatgctctaaatatgatccaggcacatttttcctataacttatatatatgcagttacaaatggaaaattgttaaaaatacaggggagaagctatgttaactttggaatggaaggttttgtttttgtagaatatgttattttcatgcaattctgtaagtctaagatcgtcatctacagttctgctcttaagaacacaagttttatgacacgctcggcttaagaaaccaaaagtgtctaaagtactttatgttaccaaccaaatttggctgctgcactcattaagaatgcaacttaaaaaattttggttaacaaaaagagtaatttgattatacaagatcttgtatactgaataatttataataatctaccactgtctaaaagtgtaagaatcaaaacagccatctaatttagtntcagaattatagatgaatacagataattataggtgacccaatcccaactaaaaaatccagagttgacaacgccagatatgtagccatgcttgtgtctttctagtcacagctcaacctacccttcagtttgaagcagtgtggtgccatggtgaagactactgatgttagagctctgaatctcggttcttactactatgtgacctgtgcgaccttgggcaaggtactcaatgtctctacaataatggacataacagtactacgtcgccttagaaa

SEQ ID NO: 233 - DNA, 1789 bp, Homo sapiens
aaaacagggctggagcagtgcctactcaatagaatcggtcatcatgcaaataaatgccaccttagtcaaaggcaaagccagagtgcagtttggagcaaataagaatcaatataatctagcaagagcccaacaatcctataattccattgtacagatacatgagaaaaatggctggtacacccctccaaaggaagatggctaaatatgttgactgttgtatgtttggactaatgttgctttaaagaaaatctttccaacatgcagacaaaagctttgagtgcccctattacagcagtaccgaagatgttagttaatagatattttagtggataatctgtcatctgacatccagtataagttacagccttcgcattttgctcattttagatatcttggactgagcagtggggcctttactgtatttttcctgataaatacacatactggccactccttatctctttttcttgaaaagtgaactttttaaagcagccaagtcaacatcaggctactgaagttgaggctttagggtaactttcctatattgagcccatgggttacaaggatttgcaatatattgttccatttacagccaatacaggtttaatcgatgttcaatattggtttaggaaatttaaggccttctaaatcataatagctctttcatgtctaaaaccattttatgatattgccaaaatgtgataggaaacctactcattaaattgttaaactttttaatgactatgtgaagatatgaattgtttcctgaagataatactcttaattgagttgtattgtacttcttaggcaaagcagtgtaaaaactgtatcaattaaggcttgtgagtagtgatttccactggggcatcagagtcttggctgggctgaatctgctgcttgttggttcagtgtttcttatgaacaagagccacagtacagagcttcaagttatttaaaatactaagtcatcttacgtttccatttattaacgggatgttgcaatcgtttgtaaactaataaacttataaagtgattggcacaaagactccttgagcaaaagctgtgcagttaagtacaaaaagatacttaatttggagactcttacagtaatttttgccatgtcaaaacaatggcttttacattgaaagattaatagaaactctacatatgttaatttttttatagaacctgactcaaatcaaggtactctccattttattgccttacctgaatcagtcctttttggttggtaatagatttttttatacacccacgtttgatttaaaagtaaattctagttcttaagcacttttaacaagaaatccagaagcacatttttctgcacaaacaagttacaaagttcaaaagtgtttcttgtgcattagctttgagattcagtttttaactttgtaaaccacatctgagagacttgtcatttctacattgtgtgtgtttaatttcttttgattccattttggttaagagagcagtaaatagattttctggtattcttgttcacttgattacatttgtataaagttctgattgccagttgctcagataacaagtgacaaggcagaattctttaaatcagtaaagttccttaagcctaaggctaaatcttgaatacattgttgaattctttaatatcctgatggcaagcagactgatagctgcacatttggcatgctttgtttaatggattttatttttaattgcagatttatttggcaatgtacagtaaattttgtaaacttgcatcaagtttatgaataaagaaccttagaaa

SEQ ID NO: 234 - DNA, 1182 bp, Homo sapiens
gtagaccctgcactcaatgtgcttaccctgtaggagcagagacagataagtcagatttcagtctggggcaggtggagccatgatgaagccttccccacacttgtgagaccactttgggagatgggaggcatccccaagctgggtcagcttgaacccaccagcaggggtgagcaggtcttctgcatacagggttttcagagacaccgggctggcccgagacacctgagctgcatcagagaacaataggttctggggcctgctgcggctgaggtgccgggtgggcacgcagctgggggcacccaacaatgaccaccagggcactggtgttcatcgggtgccaccccgtgtgccagggaatgtggactcagtgcctgccatgtcccttgctccgtgcaagcagaccacgtctgtgctctcactgaatcctctggagggacacctctctctacctctgtttccctttggtagacgtctgataacacacgtcgtattctcttcactcagaattcatagatgtcggctgggtgcggtggcttatgcctgtaatctcagcactttgggaggccgaaggggacaggatcgcttgagctcgggaattcaagaccagcctgggcaacatggctaagtctcctctctacaaaaaaaatacaaatatattagccaggcatggtgatgcataactttaaccccaactaatgggggggctgagatgggtggatcacttttgggcctgggaggcggaggtagcagtgagtggagatcacgtcactgtactctagcctaggagacagagcaagactccatctcaaaaaaagaaaacaaaaaagaattcatagatgtaacattttgcctttgatacttctgatctttgttaatcatgaaaaatactcactgggcacagtggctcacgcctgtaattccagcactttgggaggccgaggcgggtggacctcctcaagtcaggagttcgagaccagcctggccaatgtggtaaaaccccgtctctactaaaaatacaaaaattagctgggcatggtggcacacccctataatcccagctacttgggaggctgaggtgggaggattgcacgaacctgggaggcaaacccagcttctggctcaccgtgagctgagctcacgccactgcactccagcctgggcaacagagcgagactaagtctc

SEQ ID NO: 235 - DNA, 1254 bp, Homo sapiens
gccagtccaagctccaaacttgaagaattcagagtccgatgttcaagggcaggaagcattcagcatgggagaaagatgtaggctgggaggctaggccagtctctcttttcacatttttctgcctgcttacattctagccatgctggcagctgattagattgtgcccattcgggttaagggcgggtcttcctttcccagcccactgactcaaatgttaatctcctttggcagcaccctcacagacacacccaggatcaatactttgtatccttcagtccaatcaagttgacactcagtattaaccatcacagtaacgtacaaaaagcaacatatattagtaagatatctgatggctttttaaaaattctaaaactttgtttttaatattactatgggacctttcattaaaaagaaatggcaacatctgattcacccattatcctaaatgtgccatttggtggtccattacttcagacctttgttttttttgagggtaggcacttaagcttaacaattttttatctttaatcaatttttctccccatagatctctgtggtaagaagtgctactttagagacaaaacctgaatcaaaatatgtatcactcatcacgtcataccagccattttccttagaaaaggaggtggtctgtgaagagccgttgtctccagcaacagttccaggcatgcataccgaagacaatccaggaaaagtggaacatacagaagaactttcgagtataacagaagtggtgactactgaagaaaatattcctgacgtggtcccgggcagccatctgactccaatagagagagagagttcttcacctttaagtagtaaccagtctgaacctggcagcatcgctttaaactcgtatcactccagaaattgttctgagagtgatcactccagaaatggttttgatactgattccagctgtctggaatcacatagctccttatctgactcagaatttcccccaaataataaaggtgaaataaaaacagaaggacaagagctcataaccgtaataaaagcccccacctcctttggttatgataaaccacatgtgctagtggatctacttgtggatgatagcggtaaagagtccttgattggttatagaccaacagaagattccaaagaattttcatgagatcagctaagttgcaccaactttgaagtctgattttcctggacagttttctgctttaatttcatgaaaattctttggaatcttctgttggtccttag

SEQ ID NO: 236 - DNA, 1117 bp, Homo sapiens
cattaaacagatgtataccttaaaactgtggtggggccttaggccagcatgtgaaggacacaggctgtagaggtcacatggaggtcatcagcaggctgtgagcctggcctggatcagcccagttctgacagctcctccaatggcctttccatggaactcatcatgagagagaggaagggtacaaatagtacagctccaaatgagatgacataactgaaaggctaagatgggcttatagaagactgggcatctcaaagaaaccaggacaggagctataatcaagggagtatttggcagaagaccagaaggccgtcaatgaatggatgttatgttttaatagcctcgatagcagcacatcatctccaggttcttaaaaatgatcacccttgagtcagtggtgtcttctccaggagaaatcttggtgtgttttcaagtgagttctcactggttttatgagtttaatcccagttatgtttcagctgactcagctccgactggcttttttctgtttccatttcccccagcctcatcctctgccttttagggccttcctctttcattcctctgcaccctattcctcatcacccccaaacaggaacatgtacaagtattaaattagaatccaaagccaatcatcctccaaatgtgtgagaaatcaattgtccacaatggccttggggggtgctttattagggcatgttttgattgcacgtggcctgaccttaagctggaagggaaatatggtcgtgcacctcatgatgacattttgttcaaggatggaccacatatatgacgctggtcccataagatgattatggagccgaaaaattcctatcgcctgctggtgtcttgatgattctgaccctgtctaggcctaggctaatgtgtgtgtttttgtcttcatttttaatcaaaaagtttaaaagttaaaaaaatgcttaatagaaaaatgtttatagaataaggatatgaaaaaagaacatatttttatacaactgtacaatgtgttttaagctaagtgttcttaacaaaagaatcaaaaagttaaaaatattaaaagtttataagctttatgaagctgcagaaaaaaagttacagtgaggttaacttattatcg

SEQ ID NO: 237 - DNA, 1572 bp, Homo sapiens
  misc_feature 1179: n=a,c,g, or t
cactgttttgggaaacttacatgttgagatctacagagatccaggaaaccaaagccctgctgagcagagccattttgtggctatttctggaggcccaggagtgtggctgcaagagaaaaggggctggaggaagatccggagggcaggggtgttccctctgctgatgatggatgcccctaacacctgtgcctaacacccctactgaaccccacagctccagccttagtttttggagtcaagtgttaaaggtttctggccagaggaattggggtcttgccatccctgcaatagcccttttatgggctctgggagacagctttagggaataaatggggattttcccctttttctacccactcctttgcttcctccaagacttacccaactccttccccctcagagaaccaaatagcctgaggaagcaggagagttcctggttatggcagtttcttggtgatttggggcttcaagacagtaggtgagagatgctgtcaggacgtatcttcttcataccaaagtcactggtcctttctcagcctctctcgtgcttttctcctaatgaccatatttttgccaaaaattgggatatgttatctgacagaccagaatatttgaagtttgggctgtcctgaaagtctggactttggtggtaccctcctcccccagcccatctgttgcacattatactccgtgtgttcttcaactttcggcgcccttattcccctgccttcctggcttgattgaaggaaagcttgaaaaggtgcagagccctatacctcatttcctccatgataaaaggatccaagtgaggccctgtcacagcctgtgggtaggggatgcggcgggatcctcattgccatggtactcaaaggtagaagagcctggagtttgttgcttctctttgctattctttcatatcctcttgggcctggtgattaattagcaattctcattcctctcagccaaaggcctgcactgggctttatttgtctttttttattttttaagcactgcctgccagagatgggcctggggcctgatgaggaccttagcgctgctcgttctccttttctgttcatgcacacattcctccatggggtggggaaggcaggcatggggtgtggccctcggagaagttaggagtcccccagctcaagatacagtggcaaagacctagtngtcccctacccccacttctctcacttcctggcatgaggagagaagaccctgctctggtggagctgacaacctttgaggctgggaggagagcagcctctgggcatcgttcccagtgtccctcacactaaaacggcgtagatggcaaccccccacccccacccggtgctcaactcttgtgtttgttgttctgtttgccccatttatctgttgctgtttttgtgttgtcttcccctgctccgcattttgtaaaatggcccctgggggagtgtttttgctggatctgctccctctcgctctctcactccactactttttggaacaaagtgatggcagaatgcggtggtggtgggggtcttttgtactgttggattaataaaatgattttaaaatccc

SEQ ID NO: 238 - DNA, 1051 bp, Homo sapiens
attcccagtaactagcacagacctaccaaagactggctgctcaataatttaaagaataagtagagtgcagtgcaaggatgacatgcgcaaggtgtatatgaataaataaggaatcatacttacatatccaagtcatcagaaaatgtttaattatggaccatatctttaatagggcacaaggttacataatacagcttcagtgatttttcttcaaaaatcataaaatcagtgtagagacttgaaggcatttatctacagtgactcaattctgcatagattgttaagcttttagagtaattaatgatcaaccacgccaagcagagtctgactgcagtgcccttcttcctgctgtttcatctgcctgtgatcctcttctccagacacctctgttgcttgttccttcactttctccaggtctctactcaaatgtcattttattagagaggccttccctgaccaccttatagaaaataacaccccaccctctccattccctgttccccttaccatgtttaatttttttcccgtagcattcatcaccatctaccatccatccatccattcatcattcattcattcatttgttcacttcagtctcttttcactagactgtgccttgtagataaataaggattctgtttttgttgagtactccatccttagcacctaaaacaatgttaaaacaactagatgatactaaaagcatattttttgaatgcatgaatgatcataatgaagaaaagcttactattttatccccttgcaactaaggaataaggaaggggaaaaaaagtccattttcaccttttgacctcttcttgcccttcaccaaaaactgagttccctggtgttttttctctcatatgctgatgtggtgcaaatagcctaggcttgagggtgagggtgaaggtcgagttcccaccctatgattgtatgctccattgcagctcttgacagtctattagaaatccataaccatagatacttctgcttctagggctttctttgtgagcctaagatttaactaccaacacttatgttgtcatgtggc

SEQ ID NO: 239 - DNA, 1952 bp, Homo sapiens
cccagtatagaaaactgtgaatgcaaaacacctctgagttgattggcaaggggactggaggccccggtcacctccttttctctttcaaaatctccattcttttttttttttctgcaaaatctccattcttattgtgtctccttgaaatacttagatatcacctagtccaagtggtttccaggcagcacttccatcatcttatccaactttgatattccatcagttatcacaactcaaactttccaggatatattttaaactgactttcgtgtctctttgctagcttgctctcaagcagttggtatctgggaactccagattctgatgatatggtgaaaagaaaacttggcacagagccaggacacccaagttctctacctataacatgggggtctttctgttgttggtgtccccatttaatatagaaataatcacctctggctctcctgtcttgtagagttgtgaggatcacacgtgttaagctctgtatgctgtcttttcccctttccaggcacatggcaggttaacttccctgcccttttggagttggacttggccatgtgatttgctagccaatgatgcgcctgtggagatgatgtgtgtcatttccggggggaagttttaagaactcgtgcttgattcactttgttctttctcctcctggagcaactgtagaggcacatctcaaaactcacttccagtcagcatgggtttaagagtggtcagtattagcagagatcctggcataaccaaaccatcctggagagtaatcaaaactaaagctttgctgtggtgagcctgagatattagggttgtttgttattacagcaaaacctagcctatcctgactagtctagtgtgtgtgagggtaattacattgacatccacattattgattaaacttctagagtttttgaagcatgcagagcttccaaaacctaggaaaatgattatctgaagactgcttttgaactggaaagttcaaaacacatttaacaattagcctaacattgtaaaaccttttgtttgcagatttaaagccaagaatgttagtgaaacatagtgttggtcagatattcggcttttctctccctccccaaatgctgaatcttcaggagcttaaagaatgactgtgatttttttttctacagagattcaagttatctaaactaatctcttactaatcctcttattcttccagcgagttcatgaaatcagtgaattaagcattgcagagcatatacagttatgagaacagtatgttggggaagggagctggtttgcaaaaagatttcacctgtgctttactgacacagtagccataatacaaaagcagtgctttaagtagtgttactgataggaaataaatttatcctgaccttataaagcttgaaggtgatgttttgtagaagttacaaaggtgaacatagcctggtacaggcagctctgcagtggagctggttttttgacctacaccaagggatcctgcacaactcatagcactttcttggccccaggttccccatctgtaaaataagggctcaagttcctgacttactgcttcaagggtgaaatgagatgatgtatagaagattactataaaaacaaaaaaaggataattttgtaatgagttggtattagctgaagtctctattcaatttgtttggaagtctgttactcagatgctttaagcagcaagtgtcaggaagccctttccaatagtgtataatacatttaaaactgtctataaaaacatttaatccaacaactcttcatggtaaaaaccctcaacagacaagtatcgaaggaacatatctagcaataataagagccatctatgacaaacccacagccagtatcatactgaatggtcaaaagctgaaactattccctttgagaactggaacaagaaaaggatgtccactctcaccactcctatcaacccttagaaa

SEQ ID NO: 240 - DNA, 1228 bp, Homo sapiens
atataatcacttctttaaaaatgtaatagggccaggcgcggtggcttacacctttaatcccagtgcttttggtggcccaggcgggtggattgcttgagcccagagattcgagaccagtctgggcaacatagcgaaaccccgtctctatagaaaatacaaagattagcctggcatggtggcatgcatctgtggtcccagccacttggggggctgaggtgagaggattgcttgaacctggaatgttgagtctgcagtgagttgtaattgcaccactgcactctagcctgggcgacagagcaagaccttgtcttaaaaaaaaaaaaagtaatagaactacatttctaagtatgaactattatattttgtaaatttaatccctttaaagtttgaattatgagctcctagctgcaaatccttattgtgttagttttaattgatcttggtaattaacgtttttgatatgtgggatttttatcattaatttaaaatgtttcttatttcagaataattcttgagaaagatgaggaacagcctagtgtaatagattcttgccatgttgtagaattaaaacaaacaaaacccctctgtttcttaagatttgaaactacaaaagattcctccctaatattgtgaaaatgctatatctagctgttcctctagttcacttaggtcaaagtaaaatgttttaacctactgttatatcatgtaactcacttgcaacatgactaaccatctgggacactgtattaatcggttctcacactgctacaaaggaatacccgagactgggtaatttatgaaggtttaattgactcacagttcagcatggccacagaggcttcaggaaacttacagtcatggtggaaggtgaaggggaagcaaggcaccttcaccaggcagcaggaaggagaagtgccaagcaaactggggaagagcctcctataaaaccattagatcttgtgagaactcactatcacgagaacagcctggaggaagttgcccccatgattcagttacctccacgtggtctctcccttgacacttggagattatggaaattataatttaagatgagatttgagtggggacagaaagcctaaccatatcagacacataattgtttcaattttatttccaaatctctaggaataaagatttttaaccttccttgatactcataccaatgttttgtgaccttaagagtcagtaatttttttttttaacagcc

SEQ ID NO: 241 - DNA, 1791 bp, Homo sapiens
  misc_feature 951: n=a,c,g, or t
caatagcaataaataataaaaataataattagtaaataaaaaagtaataataaatagtaaataaataaaatggaagagccttgcatatccctccacatattcttgtacacacatgctggagttttatagagtagattccacgtggtgggatttgctgggtcagggggcatatgcattttacgcctttggcaggtatttccaagctgcccttcaggcaggccacaccaacctacaggcctcccagcagggggtccaagtacttcctggggctgctggctttcgactttgttgctgctgctgccaggtcactaacagggtgcatcagatggggccacttgctcactgaggcagtcactcgaggcatgtccttgtcccagagcgctgactgaggtaagagagcccctcttcatgaaagttatgccacccttgcctttggacctgttgggagcctcagagtgcaaaatgagacatttcaagttttactaagagtgaagtgtcacctcctcatagagacctttcatgaggtccccttgtcccactgtctttttctcagccttgcatgttcctgcgcagcccaaacccagcccctgcttctgtgtcttccatcgagacgtacgggatttggggacatgttctcagttccatatcctgctgtgagctaggaaggtgcctggtattcacctgcctcattttctcctccttgggcaagacaaagcagagctctcttaggaacagatgagtacagatttcaaggaagtatctagaaccttgatatcattgctgaaatcaagagctgaatatagagaacatcttggcttatagatttttttttaatcctgctctgtttgagtgttcagtgccatacctattacagacaattatgtgtggatattagtataccggcaggaaaccagtgactaagcccatctttacctggagcgctatattttncccctgtggcatggttcattgctaattatggttgtcctcagagtcagtaacaggaaatgacaacagtaaaccatccatggtggggggtgcgcctgagtgtgagagaacgaaggagggattgagaccagtggatttcttgaggcctcccccacttcctcaagtgatttaacttctctaggttgcagttccttatctcaaaaaccgggatgatgaccccacagcttccagggtgttgagaggattggacataacttgtgggtcctgttgccattactcatgtgtgttgacatgggaaacagcaagagcaacatgctcttcaaatacccagagcagattcctggagagacagtccatgaaccaaaggaagcagtttttttttaacccttttattttgtgagtcagtgaccagcaggtggaaaatattaatcaaggattacatataaacaaaaaggaacttgtttaaatttagcttttttaaaagagtagggcaaagtgtcacactcaccttcattctgtttaaaaacagagaacataagaaaatcttctcctaaaattaaaattaatagtggcttatgcggccgggcgcggtggctcacacctgtaattccagcactttgggatcatgaggtcaggagatcaagaccatcctggctaacgcggtgaagccccgtctctactaaaaatacaaaaattatctggatgtggtggcgcgcgcctgtagtcccggctattcgggaggctgaggtgggagaattgcttgggccctggaggtggaggctgcagtgagccaggatcgtgccactgcgctccggcctgggcgacagagcgagactgtgtctc

SEQ ID NO: 242 - DNA, 3196 bp, Homo sapiens
  misc_feature 2943,2945,2952: n=a,c,g, or t
attacaggtgtacgcccagctaatttttgtatttttcatgaagatggggtttcgctgtgttggccaggctggtatcaaactcctgacctcaagtgcctgcctcggcctcccaaagtgctgggattacaggcgtgagccaccatgcccaaccttttctccctttcttaactcatgagtacacaaaggccagaatagtgaagtgacttttccagggtcacacagccttcacctgcctcagctcctgccccatgccctttcgctctttagggctccattttagtatgggaaaaatgtgctcaggaaactttgaaagtcacagccatctgttgggacaacgttggcacatagtatccctgcatccccccaccacctccctctgctttgtggagttgtccattgtcctccttgtgcatttgcgtggctgtagcccctgtcctccaggcacaaatctagcttctgcaagttgcatccccacatctagccatgctttcccctcctgtgccaccattagaggatttcactgaatcacactcctcaggccagaatcctagcagaacttccagtcctgcgttagacactgtagatttcatactctccaaacccctgggtgttcatttatatataaaataagtgaacccgataccaacctgagaggtttttcttgctctcaacgccattcttaaatacaaagaggtccattttattattttatatatttgtcttttttttttttaaacaaatttctgtttaaatagggagcaagctttaccctgcatacagatccagctgcaaagggagatctgtgattttggcaaccaggctgacctgccttctggaaatggaaacaaatcttcaggtggcctgcagaagacattctccaaactgacatcccggttcaccaagaaagcttcatgtaccagctccagcagcagcacaaattattccatccaaaataccccttccaaaaacatcttcatagctggatgttccgaagagaaggccaaaatgcctggcaatattgatacaaggttacaaagcattttgaacattggtaatttccccaggactacagacccttcacagtcagctcagaattccagtaatacagtggccaatggctttctcatggagaggcgtgagaacttcctgcatggagatgacggcaaggatgagaagggtatgaacttaccaactgatcaggaaatgcaagaggtgatagattttctctcgggctttaacatgggccagtcacatcagggctctccgttggtgacaaggcataattctgctgccacagccatggtgactgagcagaaggcaggagccatgcaaccacagcagccgtcactgcctgtgccccctccaccacgggcaccccaggctggggcacacacacctctgacaccccagccgggactggcacctcagcagcagtccccaaagcagcaacaacctcaagtccaatactaccaacacctactccagcccattggaccgcaacagcccccgccccagcctcgggcacctgggaaatgggtacatggctcatcccagcagccagcgcaggctgttggagcaagtctgtctcctcttggtcagtggcctggcatatctgatctcagttctgacttgtacagcttgggtctggtgaacagctatatggataatgtgatgtcagaagttctgggacagaagccgcagggacctagaaataacacctgggccaaccgtgaccaaagtgatggagtcttttggaatgctgggagagattctgccttttgatcctgcaggtatgtgaggcttccatccctcggcccagtgtcaacagcaaatgcaactgccgaggtcttcccagggctgtctgctgcagccttacttgtgaaggtgaaatcatttaatccccctttacgacgctttctcactgtgaaggcaagtatggggcagatctaccaagatgggaaacagtggtgagaaaggggctgagaacatgagtggactatttttcttactttatagagaacagaactgaggctaagagaggttacttgaacagctcaaagtcccatagttcaagtaggctccagtctaggcctgcctactcccggcagccaaggtcagcagccctttgtggggtgcttttttcctgattatataacctgttctttgcgatgctttttttttttgcctaaactctaggacctatgacaggtgacagacaccctcctgccttcatagaatacagcttctcctgggctagacaatgaaaataccaccagagtcatcttaaaaaattagagaaggaatttacaaacaagaacaaactaggaggaggaattaagggggaaaagccaaaaataagtaaattagaaagaaaaatagagtagaaattgcaaataactctaaaggatctttggaagaccaataaaatgtataagccaatttattctaagcttgattaagggagaacaaagagaaacaaaattaggaaatagaaaggatacattaaaagcgctttagtggctcatgcctgtaatcccagtactttgagaggctgaggctggaggatcacttgaggccaggagttcgagaccagcctggtcaacatcacaaaaccctcatctctgctagaaattaaacaaaattagctgggtgtggtggtgcttgggaggctgaggcggtaggatcccttgaccccaggattttgaggctgcagtgagctgtgatcgtgccactgcaccccagcctggctgacagagagagaccctgtctcaaaaaaaagccactttaagacaataccatctaagacttaatagcaatacatttggaaattcagcagaaaatggattctttcctagcaaaatagtcattacaaattataccaagaagtggaaaacctgtccaggcatgatgtctcatgcctgtaattcctagcactgtggacgngnaggtagncggattgcctgaggccaggagttcaagaccagtttgcccaacatagtgaaacccccatctctacaaaaaataaaaaattagctgggtgtggtggcacatgcctgtagtcccagctccttgggagggtgaggtgggaagatcgcttgggctcaggaggttgaggctgcagtgagccatgatcacaccacagcagcccagcctgggcaacaaagtaagactctgtctctaaaaaataagtaaatac

SEQ ID NO: 243 - DNA, 1413 bp, Homo sapiens
  misc_feature 709,789: n=a,c,g, or t
ccctgcctcgctccttctccttctccgctgtttccccttccccagactaggctaagagaaagcagcagttccctccagcacccaagatagcatatgaatcaaacagagaattagaaagtttattggaataaatatctcacagatttgttgctcgagttccccactaagacactgattatttagtttcctgcttggggaaatgttcacacccccttgtggatacattgtccagcccagagtttgtcctccctggatatgttttgaattaatgacggccgcacctcctttcctgtatttatttggaattgcctggtggaaggaggactctgctgcactcactgactgtgtgatctttggtaaatatcttaccctctctgggcttagtttccctagtggtaaagtggaaatagtgataactatcttagatagctgttgtgatgcccacatgagatagcatctggctttacccttccctcgtctggcaataacggttaccttgcaggattggcagaagccttagagtatggtgctttgcagatgttcaccgtgtgattaatgtggttgagttccatgagagaaatggtctactgtctccctttcaggctgcccttctccgagctgtgcgtaggtttcggggaaaagctgtgtgggaaaggctctccatgggctgtggtgctgcagtgggcaggaggatcctaagaggtgggtnggcagcagttcacccatctcgaaggagaaactaccaaacgcagagactgagaaattctggatgttttaccgttttgatgnccatcagaaccttcgggttcctgtcacgactgaagttggcacagactgccctgacagtggtagctttgccaccaggctattacttgtactcccaggcctcctcactctcaacaccgtgtgcctcatgagtgggatatcgggctttgccctgaccatgctgtgctggatgagctatttcttacggagactggttggtatcctgtatctgaatgagtctggcaccatgctgcgggtggcccatctgaacttctggggctggcggcaggacacatactgtcccatggcagatgtgattcccctgacagaaaccaaggaccggcctcaggagatgtttgtgcgtatccagcggtacagtgggaaacagaccttctacgtcaccctgcgctatggacgcatcctggacagagagcgtttcacacaggtgtttggggtacatcagatgctcaagtgaacaactgggacctggacctctgggtaaccctgggtcgcctggattaacaggaaggctgagggtgtgggcaaggctgaagaaaggggactgggtacttggagactttgcctgggcccctgggaacatgtgttttgtggtgaataaattcacaaggcaagagctggtgtacaggt

SEQ ID NO: 244 - DNA, 1183 bp, Homo sapiens
cagtgattgattctgcttgtgtattgactatttgagaacactgtctctgtgaggcctggctgactcttggatgtcttttaaactgattctaggcagagaggttttctgaccagagctgtgaatttatggtaacaactctacaaaaataagtgaattttaatttttaaaactgttgcttatccaagatgtgagttctgcactatttatatactttaaaaatgtttttgttgaactatcagttttcattttttctgtttttgttcagtgtagagcattttaaagcaaataaaagtgagtacaaatagttaagctcactgcaagtagtcacaatatttactatatcatatatccatgacacatcatcgttattaccaaagcattacagtaaaacatgttttgtatttattgtaattttatcaggtgtgaaaagaacaaacataaaaagggtaaatctctatttgcattcccccagcatctgtgaccatgagcagctagttcaatctcgttctgatggatagagagcagacccaaaggattagctggtttgtttagtcttttgaacttgttccttaagaagatttttctcccctaccttgaagaatagataacagcactaggcaactgagaggtcctctgctgatcaagtacatccttcttcccagctattgcttatgtcaaaacaaaccaatggtgataatattttcctcctctggtccttgactcaggggatgatattttatacacaaattcactgaagcaccatattcttatagtgtcattttaatctacctgaccaaaatctgttttgagacaatataacaccaagtcagggttaggcaggctaagttttagtctttatgctaatttgttaaatgaccttgggtcaatttattgccataatggaaaatcaagcaattctataactttagcctgcctcctttttttttttcttttttagcttttttcttacattttttaaaacattttaagcctcatgaaattgcctttattattttcatttgtaaggttaaaagtttaaaaataggctataggtcccagctacttgggacgctgaggcagaaggatcacttgaggccaggagttcaaggctgcagtgagctgtgatcacacctgtgaatagcccctgccttccagcctgggcaacatgggtagaccctatttc

SEQ ID NO: 245 - DNA, 2017 bp, Homo sapiens
ttttaaatggtgattttcaggttcctccgtttcttctagcacactttgtagattcttagcaaacttctaaaaatgatttcttctcagtagacgttggactttgttgcttgatctcccatattttcctattttccatttctgtatcttttttgtatgggttttaaagatattttattatttacttttgaatgatttgtttttattccaactttatattttcattttctatgaatactttttttcacttaatatttctttcatattattctattcttgtatcatgtggagtagcttctcatatccttatgagaatatacgttgtgacttttgaggttttctttgttctcctatatagtctgtcttctgagttgctttggttgctttgtttactgtcttttatcttacaggcttttctcaaatatctaatatttgcctattttttgtttctgttgtttttgtatatatttaagatatacaacatgaggttttgatacatattatgaaatggtgactgtagtcaagcaaattaacatgttcatcatctcacatagttacactttttgtgtgtgtgtggcaagagcacctaaaaatctactctcatcaaaaatctcaaatacaatacaatgtcattaactatagtcctcatgttgtacattggatctctagacttattcattctacatgtctgaaactttgtatcctttgacctgcatctccccattttctccctgacagtccctggtaactaccattctgtatgctatttctgtactttttttttttttttacattctacatataagtgagatcatgcagtatttctcttcgtctcccttatttcacgaagcataacgtcctccagtttcatgtctgttttgtcaaatggcaggatctcttcttttcaatggtgaataatattcatttatatatatcacaatttcttcatctgttcatccatcagtgggcacataggttattttcatgtcttggctattgtgaataatactgctttgaacatgtgagtgcacatatcttcattgaggtagtgatctatttgtaatttagagtgggccctaagaagctgtatgctatatattttgtatgttgattgttagacttttatgggtacttagttccctccacttcttaagtttttctggggttctgcagcataaaccgtacactttttatacacaaaagtgtaactatgtgtggctttccttacttttagttaagattatatcttttttgattggtcattgttatctacactctcaacttaaaatgttggctgggcatggtgctcatgcctgttatcccagcactttgggaggccaaggcaggtgatcacttgaggtcaggagttcgagaccagcctggccaatatggtgaaaccccacctctactgaaaatacaagaatcggccaggtgtggtggcacatgcctgtggtcccgggtactggggaggctgaggcaggggaatcacttgagcccgggaggcggaggttgcagcgatctgagatcatgccattgcactccagcttaggcaacaagagcgaaactccatctcaaaataaataaataaataagctgaaaatgttttgttgctgcagcttcctctttaatttccttttatgtggtggttttgttctgttttacaaattccttttcattccttttagtgaggttttggaaagcgtacgggataaatgcacgtgatccacttgagctttttcagagaaattatgttgtatggctagagaaatctagtttttagatgtttatttgtaaggataatacattttgcaaataatttattatattattcaataaatgcatttaggttttttttgcatgtaccagagttcaagttgattaaattaatagatattatctttgtcttcatgaagcttggctctattgtagcagacagaggttaaacaagcattcaaacaaatatgaaaaatttaactgtagggaatggatacgtaaattacctattatcaaaacaaaacac

SEQ ID NO: 246 - DNA, 1441 bp, Homo sapiens
  misc_feature 1147: n=a,c,g, or t
ctctgtctcccagagtgctgtaattacaggcatgagccaccacgcctggctattttacttaattttaattagacaacatgtgacaaccctattggacagtgcaggactggagtacaagttccaagtgtcatgcctgccttttcacagagctgagcacatagtaggtactcaataaatatgatggaatgaataaatacaaagaagcactataaaacagaagcaaggatgatgtcctattcaaatccatatactcctttcaggagaattttggcacctgcttaaagaaggaggcagaggatggggatttcctataaacatttaggatattcccagattttaaactgaagctctcagcacctgcaggtggggtcaaatcaaggcaaagggaaccaatgaaactgggtgatgggcaaggccagggtctgtcctgtggtccctgccttcttggtctctgtttctgggtcttccaatgcctatgcttttttgaaacatgttaagggtaatcatcaaaatgaaaaacattctgcaggaatggggaaaagaaaacatttgttagaatggctgaagagatatggggagattgtgcgtaatttggaatgaggggctcagaacccaagacccggccctgcttgccatggctctgtaaccttgattaagttacttatactctccaaaacaccggtgcctagaaaatgagagtaagaatcataatacctcatttaccgagttgttgggaggaacaaatataggaaaatcgtgttttataatccataaagtatagtcagatatgtatatggtacacacaagctggagtgatatccgaacgtactcctaaagcacagctatataaaatataattcttatatgtgcctttcagaaaaagaaaaataacttatcaaattctatctgcatccaaacagaacctaaacaatccaaatcagactttatctctttaatattaaaaaccctctgagaaagctgatgccacagcctttttctagtaccttgttatgattcagtatgcgtgctgccaggatgttccttgtgtctttccatcccatctctgcccttttagatgcagtagtgacctctctaccccaccccaacgtgcccaagaccacctccccacttgccactgtagcctctncactctcttctctcatcttccctgctctatattttaccacctgcctcaggcccactgttttagactcttttctctatgagctgacctccctgaacttacaaattctcctgcagcacttgtcacctttccttaagaaatatctttttggccaggcacagtggctcacacctgtaatcccaacactttgggaggctgaggtgggaggattgcttgagcctgtgaggtaaaggctgcagtgagcagtggtctccccactacactccagcctgggcgacagaataagaccttgtctcc

SEQ ID NO: 247 - DNA, 537 bp, Homo sapiens
ctcgggcgggtcctacagagacagttacgacagttacggttgaaggggcccggccaggactcggggaagggtggcctgagagcagcgatgacctctggggtcactgtcccaggagggacttcacctggaacaagagctggaggcagccgcttgcccaggaggcttgtcccctgtaagtgctttcgggaagagtggcatgtggcgctgagccctgtcccgggcggcacctgggcgtttcagtgagtcctgctctcccgcacctatggccccacggcgggcgcctttcggtgtgtgttgggtgcagggcagcgcctcccgggagcgccgggtccctcgcctggagcccgcgcctgttctccctcccttcctcctccttccaggaggcgcttcgccagtgaggtgcgggctcagggcctcgagtctctcctggagcacgggctgcggtgcgccggcagcttacggggcggccagtccttgcccacaacgatgtggagccctgtgaaagtcggattcgaataaagggccacgtgtgcaccc

SEQ ID NO: 248 - DNA, 1686 bp, Homo sapiens
  misc_feature 1356: n=a,c,g, or t
cagtttccgtctgaggcagcgatggcaaggggtcaagatggacagcagccagtggtagacttgtggatttaaatgtacaggtgacagcttctaactcagatttccatttgacaaggctcataattctatacattgggctgccagagtctacagactgcttccgtatatgggatctcattcattttccatgccaaccctgtaaggttgggctgaacagccccattttatgcctgaggaatctgaggtttgggggattaagtagtgacgtgtccacaggcctttaggtttcgtggggcagatccggaacttgaaaggaatttgctatctcagtttggtaactcctcagatgctgccactcagaagggtgttggtatcactgatgcatgtgacttcatgagggagagtggagacatggcacagagggagggagggagatgcgggtggaagagtagaggccctggcgttgcacatcaccaggacgctattcgcagtgtgctgacccttcctggctgcaggcccctccaccagctgagccctcgtgtgtcatttcagggagctactttgcccgagatgctgcatattcccaccactacagcaaatccgacacgcagacccacacgatgttcctggcccgggtgctggtgggcgagttcgtcaggggcaatgcctcctttgtccgtccgccggccaaggagggctggagcaacgccttctatgatagctgcgtgaacagtgtgtccgacccctccatctttgtgatctttgagaaacaccaggtctacccagagtatgtcatccagtacaccacctcctccaagccctcggtcacaccctccatcctgctggccttgggctccctgttcagcagccgacagtgagcgcacaggagtgttccaggcctttcacctgctctgccttgaaatggctatttgggcctttccttttctttttaaacagaaacttttaatgaactgttctcttaacattgacctctcaatgaagttatgttcttaatctcttgctaataatgatttttacttttaagtcacttttgggttcactagtggattaaccagaagtgattgtagttgagtccagttttgctttttaataatgtgttgaagttttagtttttactctttgttgactttgctgcttattggcaccagggacagagtttctagatacaattttatggattggttttaatttttatgagtttgtctctgcagtgattcggtttctcagagtctcatggcatcatagtttttccagaatgacacagtagccaccggtggatgacagcccacgggcggcacagtcacttctgcctgttgctctgacaccaacccaggnagctctgctgtggcttctcctgggctctggcattagttggtctgtgtcacattgtcagaacaggtggctgctgtgtggtgccatcgagtccctgctggttccccttgtcctgggagggtcacccattgcccagggaagtgcatccacctggcaggtgacctggaggagtagcttccccgaggacccccaggcttggcctgtgattgcgcaaacccacatttcctaagcacactggacacccttcgagtgtgggttttaacatccctgtgagattgaatacttgtgccacacatgtcacaaaagagtatggaaataaaagaaaatttatcc

SEQ ID NO: 249 - DNA, 1047 bp, Homo sapiens
tgacctttatggcgcatgcagggggcaacctgcataattatcaatggcgactttccgtgtccttctgatacagttgatcagacccctgcccaccgcccaggccaggcctgtggtcatcaatgccccagttcacatccacctgcttctcttccaggctttgctgttccccagcagcctgcagaggccccacagacagcttgaggcccctcctgctgcctggccaagccccacacccgcagaccctccttcccatcctctgaaatgggaccctgtgtctgtcaccagcccaccctctgtgttcatgaacctgggctggagcttggggacccctccctgcccctggcttcctcttccatgttctgccctttcccacatgttggaggcttttccaacgtcttcagggacaggcggtaggaaccccggccctcgctctgcagctggtgcaaagctgtggctgccaggcctggccacatggcagcccagggggcaggagaagcccgggagaggcccgctggctaccagactcagccctgagcagggaacagggcccagcttccaccggcagggagttgtgagcgccttcccaacaatgtgcccctcaccccttgatgcccatgctaatggtagccaccctggttcttgttgacttgagggacctggctgtcttccctgttcttcatcctttcttctcagtccctacctactgtttgtaaccacaagtgtctctgtgtgtgggtgggtgagggcccctctgcccagtggtgtgtctcctctccctccctccctcttctgccagtggcctgggggtgtccaggctcccatccatggcccagcccctctcccctctgtcttgatccccccctccctgcccctggcttcctcttccatgttctgccctttcccacacctttgttcctcaatagctgggggctgggactgaggcctcctgcaggtacctgccccccttcacacagcacctctcaatctcctattgcttgtcagcctgtgtgcgtgtggtgcaggaaataaaggatctataccctcctg

SEQ ID NO: 250 - DNA, 1088 bp, Homo sapiens
ttagaattagaaatggcaaaggaactaaagaagcctaatgaagacatgtgcttagcagaccaaaagcctttgccagagttgcctcgtattccaggacttgttctctctggaagtacattttcagactgtctcatggtggtgcagttcttacgaaactttggtaaagttttgggctttgatgtgaatattgatgttccaaacctgagtgttcttcaagagggattgctaaatataggggacagcatgggtgaagtacaagacttgcttgtgaggctcctctcagctgctgtatgtgatccaggtctaataacaggatacaaggctaaaacagctcttggagaacatttgctgaatgttggtgtgaatcgagacaatgtttccgagattttacagatatttatggaagcccactgtggacaaactgagcttactgaaagtctgaagaccaaagcttttcaggctcacactccagcacagaaagcttcagtcctggctttcctgatcaatgaactggcatgcagcaagagtgtggtcagtgaaatcgacaagaacattgattatatgtcaaacttgaggagagataaatgggtggtagaaggtaaactccgcaagctcagaatcattcatgctaagaaaacaggcaaaagagacacttcaggtggcattgatctgggagaagagcagcatcccttgggcacacccactccaggaagcaagcgaagaaggaagggaggagacagtgattatgacgatgatgatgacgatgacagtgatgaccaaggggatgaagatgatgaggatgaagaagataaagaagacaaaaaaggaaaaaagactgatatctgtgaagatgaggatgaaggtgaccaagcagcaagtgttgaagagctggaaaaacagattgaaaaactgagtaaacaacagagtcagtacagaaggaagctctttgatgcgtctcactcattgcgttcagtgatgtttggccaagatcgttacagacgccggtactggattcttccccaatgtggggggatttttgtagaaggcatggagagtggtgaaggactagaagaaattgcaaaaaaaag

SEQ ID NO: 251 - DNA, 1450 bp, Homo sapiens
cgagtagctgggattacaggtgctcaccaccaagcccggctaatttttgtgtttttggtagagacagggtttcaccatgttggccaggccggtctcgagctcctgacctcgggtgatctgcccgccttggcctcccacagtgctgggattacaggcatgagctaccgcacccagcctgagaccaccttttgcatctcaagattgtgaaaccaaggcccattccaccagcctggggactctttttatagatatgatcctcctttttcctgtgactaatgaatttgctgcatgatttctattcttctgaggttagttttctgagtaaggtgaccactcacaaaggcactttctttgtggcattctgagcctagattggggcccatcaattccagaaaaaatttatgtgtggaaactctgcatccttaagtcttgaagttgaaccagatatgcagtggttaccatcacacagataaacgctgccttctgtacataccccttatgctgtactaattaacaaaccccttgccagggctggggaggtgagggtgaaggagaatcttagcagaagggcagagtcaggacttgcatctgccactgctgggcactgaagccctggagcagcttcagatagtacctgtactttctcatgcagactccctctgaacaagagccttgtaggcccctctccttcatttcccaccagcctcttatcaggcgggctttccaccatacacccaggaggccacggtctgaggaacaatcaaacccatgcaaagggccgggcgcgatggctcacgcctgtgatgccagcactttgggaggctggggcaggcagatcacctgaggttgggagttcgagacctgcctgaccaacatggagaaacccccatctctgctaaaaatacaaaattagccgggcgtgatggcacatgcctgtagtcccagctactcaggaggctgaggcaggagaatcgcttgaacccgggaggcggaggttgcggtgagccgagatggcaccactgcactccagcctcggcaacaagagcgaaactctgtctaaaacaaaaacaaacaaacaaacaaaaaaacccaggcaaagtttccttgcagccaaggtgacagaactgggctgagggtggaaaagaaacagaaccagtgctccaggtgttttttaattttttaatttatttttattttttttgtatatgtatatatatgtatgtatattttagaggaccagggtctcactatgttgcctaggccagactcaaactcctgtgctcaagcaatcctgcctcagcctcccaagtagctgggattacaggcatgcacaaacaatgcccagctctccaaatgttttctgtcactacctgaagtgttgcatcggtacttcctacggagagaaaactaaatagaagtgtctctcccgtgagcccccaccactaccacc

SEQ ID NO: 252 - DNA, 2477 bp, Homo sapiens
ctaatatgatacctttgaaccatcacaagatatactgaagtgtctgtgccatgatgtgtctacatactacttaccatttgttttaggaattatttggtataaagaagagaacctacatgaataagctaaaaagaataggtgttattagaaggcttcgcgggtattcatgaaatccatatatactgagctttgcctcacagaaatggggaaatgggtaactactcgttcctctctcttatcccatcatccctcctctctgctgctcgttgtttctatggtttattctcctctctctaaaggtgagtttctctgtgtacataccggtttatacatggctcatcatggctgctttcaaatggtggccttagcctgcaaatctatatgacctttcagctcacattccttatgctaaagaaatgcagattctgcttttcctgtttaggactcctgggagaaagaatctgctgcagcacccatgtctactcctcatctaagcagtgttatggggaaacaagggggagaggagaggtcatgtgtgctgggctgctgctttcagaacactgggcttgtttcctaagaacaggattaagggcagaggggtttgtatctctagtatcagttgtagtaaggactacatggggaggaaaaaatggacttgactatgtacaaggatgaattttaagttgctacacttaagagagaaaaacaaaactctcatgtagaaaactgtgtactggacatatttagatagcgatacttctacagagcaccagggaagcagaagtacctaatctgagatctgaagacaagaatcttcattctttctgggctgaaattacaaactgtttcttggaagcttgtatttctgttcccaaacacaaatccatttgatggaatccagagaaaagaaaaaggtgaattcagccaaatattcttccactcctatctgctctagaagacactgaagaagcactttctccactgtaatgcatgcgattttcatgtgtagacatggtcaccaccagctattgttggctttgtgattatcactccaaaatattgaaggccactgaatattcggttaactatatagctatttctatcaggctgttttagatcataatagagacttctaataatgctgagtagatttctctgatttgctgagaaaagttatattataatcaataattggggaaagacctattggagggcaccttctctcagtacctggggcccccttcttctcctcctgggggcaccattatggtctgctcgttcataaccccttcactcagttcaatcgctatttcgccagacttcagatgtactaaggcagtcaattcactctcatgagatgaaagcatctgtatttgaacaggctgagataccaagtttctttctttcattttaaagttccaagcagaattattatgcccatcacaggatgaccagtatggcctattaggtaagaaatatgatcccatttctaatatcctatttgcatattttcttttccaaaaggtgctttttgcacaggtcgctggcccctgaagtatgtgtctcagggcttataaggggctgatttccctctaaaagtgcttcaccctccagttggagtcaggcatgtctataggagcttgaaggctgtgttctagttctgctgaaaagacagtactagcaaaaaacacctttgtgttttccccatcttctgaaaactatttaaaagcattatattttgtccctactgcttcagtccttggtctctctaagggacttaaccttggggtgatgctgaaagattgccattttcatgcagactatcaaattgctccactaggtaaaatataaaaatgtaatgaacccaagcttgactgtaatcatacagcaacaaaatcacttgaaagagccactggcttccattttcttttcctttgaaggcttgttattctgagtcctttttccattcagggccatgtaaacaacaacaaaaataactccattttaaagtaagcattgaccagacactgttctaaatgcttaacctggattattcatttaattcttaaaaccaggtttttttgaggtagtattttcacctaattttatagatgaagaaactgacattcagagaggttaagtaacttgcctagagtcacagatcatgaaatgtgaataaagagcatggccaaatgccagacacagtggctcacacctgtaatcccagcactctgggaggcaggcagcttgcttgagcccagaagtctgggaccagcctgggcaacatggcaaaacctcttctttacaaaaaatacaaaaaattagccaggcatggtggtaggttcctgcagtcttagttaccctggaggctgaggtaggaggatcatctgagccctggaggtcaagactctggtgagcagtgattggtgattgcaccactgcactacaacctgggagacagagtgagaccctgtctc

SEQ ID NO: 253 - DNA, 1120 bp, Homo sapiens
tggtgatcagctgggtgcagtggctcacgcctgtaatgccagcactttgggagactgaggtgggcagatcacttgaggccaggagttcgagaccagcctgggcaacatggcaaaacccagcctctactaaaaatacaaaaagtagccgggtgtgttagtgcatgcctgtaatcccagctcctcaggaggctgaggcacgagaattgcttgaacccaggaggtggagattgcagtgagctgagatcgcaccactacacttcagtagtcagggcaacagactgagactctgtctccaaaaaaaaaaaaaaaaagagtggtggtgatccatcagtgattttctaagatatgccgggatttaaattctgtagttcactgaggtttctttatttaatcaactttcctattgggaagtttgtgtgtttagccattcttctgccacatttcccccttcttagctgttgtcccctccaagatcatctggattttccaggcaaggagtcaaggtattcagggtcatgctggttgccatcatattctctgagtgttgctgggtctccccttggtcaccttcccaacacgtacatgcacacacctagaacgttctctctcttgcccattccccatccctccgtaaattgggactcttttaaacccttctccatcagggaagcccttgccactgtggagtctctaggacgccaggccttcccaaacacacccaccacgtgggcctttaccctccacctctcctgactctgtgccaggtctctgctcttctcttcacaccttgctcttcctgggctctagaattattggaattccggaattaagatggtaattggctgggtgcagtggctgatacctataattccagcactttgggaagccaagggaggattgcttgagtccaggagttcaagaccagcctgggcaacatagggagacaccctctctacaaaaaatgttaaaatattatccaggtgtggtggtgggtgcctgtaatcctagctactgaggaggcttaggtgggagaattgcttgagcccaggaggtggaggttgcagtgagccaagattgcaccactgcactccagcgtggacaacagagtgagaccctgtcc

SEQ ID NO: 254 - DNA, 1736 bp, Homo sapiens
  misc_feature 608,669,1358,1363,1404,1409,1412,1417,1420,1425,1531: n=a,c,g, or t
cgttatggtggttctctgccaacaccctaccacactgacagctctccctatagtcctgcctacttatctcctccccaagtgtccagctggtgaaggactatctcctgggacaatttccctgcagagaaggggtacctgttttgcccagcatcctgcccagccaacatttcaggttggtaaaatggactccaaagtacctgctattgaggagaagttctcctaggtgacaagcatttgctgaagccatgggatacttagaagctgtcgtcaccctcctcctgaccccggtcctaatgaagtccctggaattaatatctttccatttcctggccagcttgccaatgttcctgtcctcccacctgccatgaagactggatgtggcaggaggtccctacctgacctcatcaatttgtactttctgccagcactgcccaccccccggaccctgaggagacagcctactctagcctgaataggggcaacagtacctccaatttgactcacatcatgactcacctgggcattagtgagggcctgagcctggacttgggtccaggtcatgatgccccaggactttgttcacctctcagccacccatccctgcagtnctccctaagcaatcccgatctccagacttccctgagcagtcctcagctccatcttcagggnatccacagtctccctcactatcttcctcttccttggcccaccatgccctgcctactaccttcctgggccagccctcactaagtaccctgccccccacttctcctcctcctccccctcttcctccccctcttcctcttccttctcctactcctcctctcgtcctccactttattcttcatctgcccctaccttactcaacctctactcctggggcctcccaccaccactgccttgtacccctcagcccctaagtttgctcacaggtccagccgatgccagaaggttcgcaacagcagctaccccaaacagtttttgccagtgtcacccacccctgtcttccatccgttcagggtgtccccctggagaccagtaatctgcacacccagccacacaccccaaagtctctacagcagccagagctgccctcctcacgccctgctcagcgcagccctcaggtgggtagcccctgagccaggccaattggattatggaatactccccgcctcggcccactgggcttgggcaagtcttcactggccgatgagtgacttcagcctggggaactggagcagttcagcatggagagcccataaatcagcctggtgatgggtccccctggcttttctgaagggcctggatttttagaaggtgagggaccagtggctggccctcaggattcccacaccctnaaccnccagaacttgacccaccactgctcctgctgtggctcaaggntgaanatnatccncanagganactccttcccaggtttctctaaggagattgcagcaaccctggctggagtgcctggctttgaggtgtcagtagcagggttggaagttggggctagggctagaaaatnactgcgcatggagctattgggcctggaagggctatacatgctgagagacccagtgccctgctacccgatcctgctctggagtattcatcaaccatccctcttcttggccctgtcccccataactgtccatttcctcccttaccccagctagtagagacgccactctgtccctaagatcctctttgtagcatgaacgaaggagccc

SEQ ID NO: 255 - DNA, 1116 bp, Homo sapiens
atcaggcaatggtatcgggctctctcaagggtctagcatctagaacggtgccaattatgtagcaggtgcttgcaggtttgttagatgattagatgtttggaacaaccaagtaaaatccatgacagcaaggacttgatgttgttcatcttgttgtcttgagtgcctagaactgttcctgccatgtactaaatatgctcaactgattccaactactttagcatatactacttgagcacatgacagtcttttgctgaggtgctttggcattctttctaaaagatagatgggtgtttcattaatgtggtatccatttgggtttgtgagttcttggatgatgccagtagtatgtaagttaggtaaaatatttcctattttcctcactttggagtttgttttccttatttaaaagggactttgaaatttaagtatgtactgtagctttaaaactgcatttctgcaaaagcacgtgcatttttaaacaatgtaatctttatctttgcagttatgatatgactctgacaaatgcttgtattgccttaagtcaaagatggattactgccaaagaagatgatttaaattcattcaatgccacagacctgaaggatctctcttctcatcaattgaatgagtttttagcacagacgctccagagggcacctcttccattggggcacataaagcgaatgcaagaggtgtacaacttcaatgccattaacaattctgaaatacgattcagatggctgcggctctgcattcaatccaagtgggaggacgcaattcctttggcgctaaagatggcaactgaacaaggaagaatgaagtttacccggcccttattcaaggatcttgctgcctttgacaaatcccatgatcaagctgtccgaacctaccaagagcacaaagcaagcatgcatcccgtgactgcaatgctggtggggaaagacttaaaagtggattaaagacctgcgtattgatgattttagagatttctcttttttaaatggaattcgtaaagaaatataaaacttcagctcacaattaaaactgtctttttagttttggctttttattgttttgttggtgattttactgaaataaagttgagctacttcttct

SEQ ID NO: 256 - DNA, 2039 bp, Homo sapiens
ggtttcccacgttgcagagactaactgaaaggacatgagggctttaccctgggaatgctctgctggggcaggtgggtgttagctgcgattctgtgttattttcccatcctcagaggtctgcggggtttccgagaggctcgccgggatttctggcggggggctgagagcctggaggctgccctgacccacaacgcagaggttcccaggcgccgggcccaggaggcagaagaggcaggagctgctttgaggacggctcgagctgggtaccggggacgggcactggattatgccctgcagatcaacgtgattgaggacaagaggaagtttgacatcatggagtttgtgctgcgtttggtggaggcccaggctacccatttccagcagggccatgaggagctgagccggctgtcccagtatcgaaaggagctgggcgcccagttgcaccagctggtcttgaattcagcacgagagaagagggacatggagcagagacacgtgctgctgaaacagaaggagctgggtggggaggagccagaaccaagcttaagagaggggcctggtggcctggtgatggaaggacatctcttcaaacgggccagcaacgcatttaagacctggagcagacgctggttcaccattcagagcaaccaactggtttaccagaagaagtacaaggaccctgtgactgtggtggtggatgaccttcgtctctgcacagtgaaactctgccctgactcagaaaggcggttctgctttgaggtggtgtccaccagcaagttctgcctcctccaggctgactcagagcgcctcctgcagctgtgggtcagtgctgtgcagagcagcattgcttctgccttcagtcaggctcgccttgatgacagcccccggggtccaggccagggctcaggacacctggccataggctctgctgccaccctgggctctggtggaatggccaggggaagggagcctgggggagtcgggcacgtggtggcccaggtccagagtgtggatggcaatgcccagtgctgcgactgccgggagccagccccggagtgggccagcatcaaccttggtgtcaccctctgcattcagtgttccggcatccacaggagccttggtgttcacttctccaaagtccggtctctgacccttgactcatgggagccagaactagtgaagctcatgtgtgagctgggaaatgtcatcatcaaccagatctatgaggcccgcgtggaggccatggcagtgaagaaaccagggcccagctgctcccggcaggagaaggaggcctggattcacgctaaatacgtggagaagaagttcctgaccaagctgcctgagattcgagggcgaagaggtggcccggggcgcccaagggggcagcctcctgtgcccccaaagccttccatcaggccccggccagggagcttgagatccaagccagagcccccctctgaggacctgggaagcctgcaccctggggccctactgtttcgagcgtctgggcatcctccatctcttcccaccatggctgatgcccttgcccatggagctgatgtcaactgggtcaatgggggccaagataatgccacaccgctgatccaggccacagctgctaattctcttctggcctgtgagtttctcctccagaacggggcgaacgtgaaccaagcggacagtgcgggccggggcccgctgcaccacgcaaccattcttggccacacggggctcgcctgcctgttcctgaaacggggagctgatctgggggctcgagactctgaaggcagggaccctctgaccatcgccatggaaacagccaacgctgacatcgtcaccctgctacgactggcaaagatgagggaggctgaagcggcccaggggcaggcaggagatgagacgtatcttgacatcttccgcgacttctccctcatggcgtcagacgacccggagaagctgagccgtcgcagtcatgacctccacacgctgtgacccgaggccacgggcccgcgcctgctcccttcccgcaccggccctct

SEQ ID NO: 257 - DNA, 1338 bp, Homo sapiens
cgcaatccttcctgtgaggatgggcgccttcgggtgttgaagcctgagtggtttcggggccgggacgtcctagatctgggctgcaatgtgggccatctgaccctgagcattgcctgcaagtggggcccgtcccgcatggtgggcctggatatcgattcccggctcatccattctgcccgccaaaacatccgacactacctttccgaggagctgcgtctcccaccccagactttggaaggggacccgggggcagagggtgaggaagggaccaccaccgttcgaaagaggagctgcttcccagcctcgctgactgccagccggggtcccatcgctgccccccaagtgcccttggatggagcggacacatcagtcttccccaacaatgttgtcttcgtcacgggtaattatgtgctggatcgagatgacctggtggaggcccaaacacctgagtatgatgtggtgctctgcctcagcctcaccaagtgggtgcatctgaactggggagacgagggcctgaagcgcatgtttcgccggatctaccggcacctacgccctggggcatcctggtcctagagcccaaccctggtcgtcgtatggcaagagaaagactcttacagaaacgatctacaagaactactaccgaatccaattgaagccagagcagttcagttcctacctgacatccccagacgtgggcttctccagctatgagcttgtggccacaccccacaacacctctaaaggcttccagcgtcctgtgtacctgttcacaaggcccgatccccagcactaagtggcccctaaacagaaagtgtgaagaggctgccctcgctgctcataaggacctgggggaagaggaaagtgtcccaaggtctttcctttctgactccaaaaatagtttcctttcttggatctgcaaagaaagcttttcttccgtcgctgcctcagcctcctccctatgcctctggcacctgtgcagcaaggctggctgtgctggagtcaccatcatcttcctctcccccagcttcccaggctggatggcatggactgtttgctgacctctgttctcttagggcatgggaggtgggaggatatcaaattctctagccctttcctcctattctcccaaggagagagattcccatttctcctcggccattgtacctagctcttgtccctagctgcatttcagtggaccatggatagagggactgagggttagacggggaagactggcagggaggcacgcaggtactgtgaaaatccttccctttgccctcccccagtgggagagggggttgggttttcaatgtgagaacagcacaataaacttgatgt

SEQ ID NO: 258 - DNA, 1213 bp, Homo sapiens
agcagatggacctatacgggtaaagtggcttctgggcggaaggtacactataggctcggggaggtagaattgggctatttgctgaagcttcttggtggcccttgctagcccaggaagaaacttacattttgatttttttgtaccatggctttggttcacaaattgctgcatggtacttattttctcagaaaattctctaagccaacttctgccttgtatccatttttgggtattctctttgcagagtattccagtagtcttcagaaaccagtggcttctcctggcaaagcctcctcacagaggaagactgaaggggatttgcaaggagatcaccagaaagaagttgctttggatataacttcttctgaggagaagcctgatgttagtttcgataaagcaattagagatgaagcaatataccattttaggcttttgaaggatgaaattgtggatcattggagaggaccggaaggccaccctctgcatgaggtcttgctggaacaagccaaggttgtctggcaattccgggggaaagaagatttggataagtggacagtgacttctgataagacgattggaggcagaagtgaagtgtttttgaaaatgggcaagaataaccaaagtgcactgctatatggaactctgagctctgaggcgcctcaggacggggagtctacccgaagtgggtactgtgcaatgatatccaggattccaaggggtgcttttgagaggaagatgtcttacgattggtcccagttcaatactctgtatctccgtgtacgtggggatggtcggccttggatggtgaatatcaaggaggacacagatttcttccagaggacgaatcagatgtatagttacttcatgttcacccgcgggggaccctactggcaggaggtcaagattcctttttccaaatttttcttctctaatcgaggaagaatccgggatgttcagcatgagcttccgcttgataagatctcttctataggattcaccttggctgataaagtggatggtccattcttcctggagatagattttattggcgtgtttactgatccagctcatacagaagaatttgcctatgaaaattctccagagcttaacccaaggctttttaaataaagatcatatggtagttttgttttactaatctaagggtactagcatctacaatgatatagacaaaataaaatatttctttaatggc

SEQ ID NO: 259 - DNA, 957 bp, Homo sapiens
  misc_feature 533,629: n=a,c,g, or t
cagaggcaggcaggattttggagctggaagaatctgctctccggtggctgccctgtgaacagagggctcccggtcagcttcccaggcccttcgccctatgcccagagggcagactgcctctccctgggccggggtggcctgggtgccaggaggaggggagcataccccacaccctccctgccaccgttgccgttccagaacctcggtcagtgtttccctgtctgggggcagggcccagagcgagcacgcgtctggcggctgctgtcgttgtgttctaccccgtactgacccaacaccacaagggctttctctggtcccctgtccctaagacaataatcgctttctgacaaaggagcctgcacatttgggtgagcagacccaagctgtttacagctctttcttgtcctgccatccagtagcagttagtcttcatccccacgtgaacaaaatgggaaggagccgtgagagaggagtgaggcaacaggcacccgaagtccctcgtccttccctctgtgtgctctgaatatgtcctngtccttcctgacccatctctgaccagctgggaacctgcttggggtcccctcaaacctgtgtctggggtgtgggctcacagatccctatcagcctgnttcgtgggagggctcttcctaaagggacccccatctctaagtcactctgaaagggagttgtggagaggagacgcctccagactctcagaagttttgaggactgaactgggtcactcgggatctgtgttcgaatcctccccacccctttctttgtggagtttcctaacctgctgctgaagcacaatgttttggtgctttcttttctcatttgttaaaggcagtgtccaaaagccattccagatgccaagaccaggggcttatttctagggaaggtaggtcggtttccatgtttccctcccgttattttaattttttactttttgcctga

SEQ ID NO: 260 - DNA, 1085 bp, Homo sapiens
caaccatggaaccttgttggatatgagtctaggtggcctttgatttctaagcatagtccccagaacagtctggcattggaggggtggattggatggggaggatatagattcccttgtgattctatcatggtgtctatcatggacacctcagcccctcttcatctcctatctttcttaacgttatctccatcctttctttgtgaagcttgtgcgcttttgtttctcaactttagaaagcacacccactgtacagacatgtgtttgccatggcaacagacatccttctccactgctactttttgttaccccaaataccatctttgtcaggaattcctcaactgacctgaaggttttatgacaaatcagctctgtctggtgcctaatgtcatgtctgcagtggaaattatggcccagaaacttccagcatcttgtcctcaggaaatagacatgggccctgaattctgacacccttagtccaaaagccagttcactgaaatactggtggctgcctatacatctggacccaaagaagctagtaatcacctccatggcctcaatgctgcttcttcttcggtgaatcaaagtaaatagtaaagccaccagcagggctgtggccaccagcaatggtatgcccgccgctaatccaagagagggcccacagtcctggcacagaatgaaaaacacagggtcagaggaagcccagagtcttcaataataaaggaaaaattcaatagaataaaaataaaacaaaaaatctgcatggatcataaacgtcatatacaaaatcaaaagggtaatgaaatactgtgcaaaaatgtttgtaacacacatgacaaatgacttactttcataggacttaatttacacagtttaaatctgttggaaagagtaatgatcaagtagaaaaatgggcaaaggatatgaacaggtattctttagaacagaaatacaaatgtctcttcaatgtaggaaaagctgagatacaattcagagcaacaattagatgtcattttcacctgtttggctaaaaataaaagcttttattatacaccacactttttttttgtttgagactctgtgtcagg

SEQ ID NO: 261 - DNA, 2152 bp, Homo sapiens
  misc_feature 1946,2037,2103: n=a,c,g, or t
ctcaggactctgacctagacatgtgatctatgagctcaaaagattgaaaaatgttgcagctcaggaacattttgtcttcacgtgtgctgcttgtttttgtttgggtttcagctctcactgtttattagccaaggaagcagcctggtctagtgcaaagagtaagggctttggagctaggcaggaccttgaatagctccatgcatctggctctgcctccccagtgtgggagtgaaagaccctcctggcggactgtggagctggtggagtaggccaggagcacagattcacctctgagtctgatcctccacccaccacacctcagcctaagtgcgtgcagtgattagtgtcgcctctgtcccaataaaagggttgtccttggtcatggatggtagccgggctcctggggccagactgcctgggtttaaatctttgttcccttacacttttagctgtgtagcctcgggcttcacttaactctctgggactggttccttgtcataggatcgatttgaggctaattaaatgaggtcaagcaggtaagaaggcctgtcatacctagcacatatagggctccgtacatgttgttggtcttatcactgttaatgagttaatgcacgtcaaatgagtcgtagcacctgggacatagtaagtgcccaataaatggtagctcttgtctttatcacatgagcccagaggcccaggacaggaggcactggcttctgggaggagaggagatagatggttttctacattcagctctggttagatccagaggttttcattctccccaccctctaagcttttggtgcctatatccctgaccaacaggaacccagcaatggaccacaccacttctacctgagccattgcacagagtcacctctgcagttggctttgaaagaattagagctcaagtttggaataggcaattcagtcacaggtttcaaaaataaaaatatatacattgtcttagtctgtttgggctcctggaacaaatactttaaactgaataatttgtacacaacagaaattgattactcacagttctgaaggctgggaagtccgtaagcaaggtcttggcagactcagtgtttggcaaaggcttgttctctgcatcatagacagcgcctcacatggtggaaggggctggccagctcccctgggcctcttataggggcattaatgtcattcatgaaggtggggccctcatgatctaatcacctcttaaaggcctcacctcttaactctggcattggggattatgtttcagcatatgaattttgagggggtaccagcattcagaccacaacacacataaaacactgccttctcttctcacatgcccagtgtcttccactctcccctgccaaccacagctaagatttctagggtcttcttttttttgtttttaatcagggtattatttgcaagtaataaaattaaccagctttaagtgtacagtttgagttttggtactaatcatgttgccaccaccacaatcgagttatagaacagtttcctcaccctaaaaagtcccttcatgcccctttggcccttttccccctcctagacagccttgttccccatccctagacaaccactgatctgctttgtcaccgcggttttgccttttctataattgtaaataaatggaagcagatagtatggagtcttttgtgtttgacctctttcgtgtaacatgatttatttgattcattcatgttgcatgtattaatatttccttttcttgctgtagagcattccatagtattccatggtatggacgtaccattcagcagttgatgaacatttgggttgcctccagtttttggatgttgagagtaaatctgttataaatcttcacagatatggccgggtgcggtggcttacgcctgtaatcccagcattttgggaggccgaggcgggtggatcacgaggtcaagagntcgagcccatcctggctagcaacggtgaacccccgtctctactagaaatccaaaaaattagccgggcatggtggcgggcacctgtggtccntgctgctcgggaggctgaggcaggggaatggcgtggacccgggaggtggagcttgcagtgagccgngtttgccccactgccctccggcctgggcgtcggggggggactccttttc

SEQ ID NO: 262 - DNA, 2074 bp, Homo sapiens
  misc_feature 1883: n=a,c,g, or t
cgggcgcagggcgcgcagcccaggctgagatccgcggcttccgtagaagtgagcatggctgggcagcgagtgcttcttctagtgggcttccttctccctggggtcctgctctcagaggctgccaaaatcctgacaatatctacagtaggtggaagccattatctactgatggaccgggtttctcagattcttcaagatcacggtcataatgtcaccatgcttaaccacaaaagaggtccttttatgccagattttaaaaaggaagaaaaatcatatcaagttatcagttggcttgcacctgaagatcatcaaagagaatttaaaaagagttttgatttctttctggaagaaactttaggtggcagaggaaaatttgaaaacctattaaatgttctagaatacttggcgttgcagtgcagtcattttttaaatagaaaggatatcatggattccttaaagaatgagaacttcgacatggtgatagttgaaacttttgactactgtcctttcctgattgctgagaagcttgggaagccatttgtggccattctttccacttcattcggctctttggaatttgggctaccaatccccttgtcttatgttccagtattccgttccttgctgactgatcacatggacttctggggccgagtgaagaattttctgatgttctttagtttctgcaggaggcaacagcacatgcagtctacatttgacaacaccatcaaggaacatttcacagaaggctctaggccaggtttgtctcatcttctactgaaagcagagttgcggttcattaactctgactttgcctttgattttgctcgacctctgcttcccaacactgtttatgttggaggcttgatggaaaaacctattaaaccagtaccacaagacttggagaacttcattgccaagtttggggactctggttttgtccttgtgaccttgggctccatggtgaacacctgtcagaatccggaaatcttcaaggagatgaacaatgcctttgctcacctaccccaaggggtgatatggaagtgtcagtgttctcattggcccaaagatgtccacctggctgcaaatgtgaaaattgtggactggcttcctcagagtgacctcctggctcacccaagcatccgtctgtttgtcacccacggcgggcagaatagcataatggaggccatccagcatggtgtgcccatggtggggatccctctctttggagaccagcctgaaaacatggtccgagtagaagccaaaaagtttggtgtttctattcagttaaagaagctcaaggcagagacattggctcttaagatgaaacaaatcatggaagacaagagatacaagtccgcggcagtggctgccagtgtcatcctgcgctcccacccgctcagccccacacagcggctggtgggctggattgaccacgtcctccagacagggggcgcgacgcacctcaagccctatgtctttcagcagccctggcatgagcagtacctgctcgacgtttttgtgtttctgctggggctcactctggggactctatggctttgtgggaagctgctgggcatggctgtctggtggctgcgtggggccagaaaggtgaaggagacataaggccaggtgcagccttggcggggtctgtttggtgggcgatgtcaccatttctagggagcttcccactagttctggcagccccattctctagtccttctagttatctcctgttttcttgaagaacaggaaaaatggccaaaaatcattctttccacttgctaattttgctacaaattcatccttactagctcctgcctgctagcagaattctttccagtcctcttgtcctcctttgtttgccatcagcaagggctatnctgtgattctgtctctgagtgacttggaccactgaccctcagatttccagccttaaaatccaccttccttctcatgcgcctctccgaatcacaccctgactcttccagcctccatgtccagacctagtcagcctctctcactcctgcccctactatctatcatggaataacatccaagaaagacaccttgc

SEQ ID NO: 263 - DNA, 1313 bp, Homo sapiens
  misc_feature 673,778: n=a,c,g, or t
atgagcggcatcatgattgtgttgttggctgaaagccaagctagggttgacacccacatatcaaactccaaggccagtgcacttttcatgatgtgccagtacccacccactcacccttggatcctccctccaccgccactgttttacaggaatgccaatactgtgtcctgtgtgaatgctaggatgtactcactgagcctccttgaggcttgggtgaggcccctctttggaaggatggagctgcctagcttcctcctggtctcatctctatccccactccttctccaaccctgtcatggttcatagccccaaagtgacagatcttccacactctggaatttttttcacacgtgtggaggactgggattgctagaatttgtttctttttattggttggtgacccaagaaatctttgaccttgtggaccagtggtttctcaaatgcagatatatttaataaagtcagggtctgttagcggatggtattggtccctctctgggtatttatctttattttattgtttttccccaaggcttgatcgtagacacataggttatgtgtccattatagacatatgcatctattttcaagaagtaaattttagttcacttactgactagaaaggaaaagaaagtgttttagagtagacacgtcagacacgacagattttttnccctttccgtgctataaatgagcagtgaaaatgacttttgctattaaaagctgtagaccagccgggcgcagtggttcgtgcctgtaatcccagcactttgtgagncccaggcaggcagatcatgaggtcaggagatcaagaccattctggccaacacggtgaaaccccgtctctactaaaagtacaaaaattagctgggtgtggtggcacgtgcctgtgatcccagctactcgggaggctgaggcaggagaatcgcctgaaccaggaagtcggaggttgcagtgagcctagataacaccactgcactctagcctggcaacagagtgagactccatctcaaaaaaacaaacaaacaaacaaacaaacaaaaaactgtagcacctgtaaaaaatagtaaattataggacattatcaaagtttataggcactagaatttgaccttcagtaaattcaacattggagggtaacagggttttctttcctttcttcaaaatgaaaaatgagagggaggaaaaagatttatttccttctggggctggagtaacaactggaaatggtattccccagccggccgcaattctaacgttactggccgaagccgcttggaataaggccggtgtgcgtttgtctatatgttatt

SEQ ID NO: 264 - DNA, 2330 bp, Homo sapiens
gggaggcagaggttgcagtgagctgagatcactgagatcggccactgcacgccagcctgggcgagagagtgagactctgtccctacaaaaaataaaaaaataaaaactatttttcatttaatctcaaaagcttgcaacagcataaaaaatactttattttcctttatggaagttgaaaattcaaatgtagttagatatgttaatatattattgcattgtagcttagaggttatgttctcattctgggttattctggcattaatcctgactcaatcactttccagttgtgtgattttgggcaaattgtttatattatctatccctttgtttcttcttctataaaatgagaataacaatagtgcctacctcatatggtagttatgaggattaaataaattaatatacacaaagttcatagaacagtccctggcatctacaaggcacttaataagtctaacttattgttatttaaatgagccctctggaaggcagggcattaagaagatttccagatttgctcttggagcatcttgagatgctgaaatgaggatggcagtttctaccgatggactttcctggtttgcagtttgaatgtcttggttgatgtcatcagatgttttggtgaattctctaagtggccccacagaaacaggcacaaaggttccttacatgagccatgatggcgatttgtctaaagtttacatcaaatcatccagtaggggttggggaaaaggacagttttaagaatttggaaataatagtttggagggttgtaaccagatattggaggaaactagaggaattcaggatccagtgcagtttataggtggacagtgcctcaaagacaataaacaggactagaatctgataatgggcatacttagagttttctatggaaacacaatttttctctctacagttcccatttctaccaaagataatcacaggctaatttgttcgcaaaataagttttgtctcattaagctggcctgattatatatgtaagtgcagcaagaatagtgaatatgtacacattctcaagtatgccattccagtcagaggtttgataatatctaaggggctttattggttttgtaaagtcaatctgaattccttaaaactgtctggtaataaggaatctgaaattagactttaaaaagccttttcagtctaagaagccaagcagaggacttgcccaattgtgtcctgttacaggggaaacaaactttcattgaacttatgtaaatatttatattgccatgaaaataaaagaatactcaataagtttctgaattttggaggggttggggtagggagaaaagaaaatgtgtttcatttttgtttacaaaagtattcttcaccaaattgctgtaagttgtaggtcttaagggaaaagagaaaaggcattctttaactctagaaaacaaacattaaagaacccgcaatatttcaaagacataaaaattataatcaccctcatcagttcattcagtcccctgtaattcttgttctgcttgattttgggttagcagcctcatgaatccattggttttccattagagtgctggaaattctacccagtccaatgctgtgatcttaaagttaccagaaacctgcacttgtcagagtcttttctgtaaatcttccagcaattttgtatcacagatgcttgcaaaagctttcaggaaatatcagagtaaaaaatcactgtctgtagatggcaaaagatttaaaatgtccatagttacagatttgatgacagttcattttaatgcaattgacaaggaaatttggttgtttattttataacatttgaagataataactggaattatgactgataaaattataccagaacatatccaatttctaggaatttcatacaatttctaaaacacttacattaataatatagtcatacaaaaataacataaggttaagcatcacctttgacaatgcttctcatgcagtgtaatagatcaaataagcctagttagtttcacatatcaaataagcctagttagtttcacatttatttgacaatgcttcccatgcaaagatgcttaattagtttaatgtctgtgttttttttttttttttttaaagaaatagaacaagattttctaggggccgttgaaaaatcccagagttagtctaaggtcagaaaagacttcattcagaatttgatttttgagacgtttataaaaagaatacccaaaagattcaagattcaaagcacttgattaaataggattacaggtatttagttatccatttaaccaaagtgacaaagatttcaaaggcaaatacagagaaagccatgtagttgg

SEQ ID NO: 265 - DNA, 1046 bp, Homo sapiens
  misc_feature 607: n=a,c,g, or t
gaattgctgttcatctttgaatgtctctgctttactcctgaatgaacacaaacacattttttttaggtttcttgttgacattggctttctttatagcccataaaaaatgcatttgtggcatctcttccacagacaaaaatagtataattatgattcaatactcgatgaatgtgtgttaaactaaactgtgcccaagctctgtgcaacagtacaggtttttcacctttccaggggagagttgtggagcacatatacatttcagccatcctacatgcccacagggacatctttctggtctgtctcattggaatacccttccttatttggtttttagtttctttctgctttaagcacctttcagagagagagagatgttttcctttgtctttgtataggcagtgcctatcgttacagagtagcctttaaatacatatttgttgaattaataatgatacacatgaactgatgaggctctataattctatgagataatctggtatcgtgggaatattttagcatgttttgtatagatagactgacactatgactggtaatctgatagtaaaaatggcaaaatattgagcctgagtattattttattatgttnctttcttatacaaggggggaataaaataaagtgatgtggactgtaattgtgctcatgaaagacacaatgtatacatacctccttgagacggaatgataaggataacgtagaatgtttaccatgatttatcaatctctcctatataagaaaaatatttcttgtcctgaagtggtaactttggtgaagtcttttgcttgctcttttacagactaattaacaagttttctatgccggctctgtcctttcctctcctctcacccctgaaaagtggttaaaagtttggcatttgttacccagaatactaaatgtaacacatatgtggcaagatttgatggaattgcacttctgttcttattatgttcctttctggaaaattatgacaatttgtgtccccttagagagtgtagcacagttttctggttgctcctcatgataatcc

SEQ ID NO: 266 - DNA, 1009 bp, Homo sapiens
tctaaacaggcatccttgtgtaaatgctttgaacaaagccctgtcactgtctgtgcttggaagacatgcagaaacatgacacccatggagaaccatctccccaccagtcatctgagaagttagcaggcttgttttaatgctggacagatgcttggcgtggacagtctaagagttaactaggctgctcagtatgatagtgatgggtgccccagccctcctcatggaggtgagccgcgcacattcagcttgtttctcatcgagacagaggacagcattctgttaagtttctgctgctgccatgataacagagctcgctgtcacattctggctcccgcaggctgtgccccggacacaaagcaactctgtctttaccctcgtgagcgcagcttgggccataataggactttctttcatttgtatctattcttattgtaagccttagatcatttattccttccttacacttctagaggtgaaagaaaacccaagtctgcctttgtaaaaccaagctgtggcctcaggagtcagggctggggcactcagccttccacccccaggcctcctctgccacaggcctgctgcattccggctgcatttcagtcgggcagccggtgggtttcctgacatgcgtgataagagtgggtttgagtttggtttggcttgttttttacagttgaattctatattatttggtcaaaatattactttgcaatttgcaaatgtggtggcacctaccattttactagccacaagtaactcataagttgacttaggacctgctcatattataccaatattttaagtattttatgtttcatcttattagttattcattttattttatctaatgctctgccagaattcattccaaaaggtaaaaattactaaactataagactcttaaataaggcgtgtatattagcaacttagtttctgacatatagaacattaacattccactgtatcttaaatgtcttttgcccttttattaaaaaattgattaaatggt

SEQ ID NO: 267 - DNA, 2154 bp, Homo sapiens
gagggggctgccaggctggctgccgatgctccgttcacataagccagtgtggttctggggacctgaggagccctgtggcacccacagggggcacctatgtctgccgtggctcctcgggtggtgccctgtgtgacaaagcccaacagcaagggtgactcctggcaggtgggggcagcaggagggcagagggcagagctctggccacttctgcccacttcattagggtttgtgaactttgtccttcacctcttttcgtgccctggttgtgagattgcctctaacaggtaatgccaggggcccttcactccgcccccatgactgggaagaggcctgtggcagcgccgctgggaccctaggaggctcagaggcagtggtgtgggagccctgtctgcaaggacgcagaataagcagtgagggcggctgcaggagaggaaggggctcccacagcccccactgatgccgctgcaggcccctgtcgagctggggtcccagccaggtgccccgcatgccctcctgcagttgctggatggatagggacaccaggaagaggacaaactgcatggactcaagcgagctggagccatcttctccatagcattacggacttgagcataagagtaaatgactgtgaacgttgtagtaaacggcagcttaagatgagtaagcagagacagtgtgaagacgagttggtgtctgtggtagcttttaggctgctctaacccaccatttattgccttctgagaggtgggtggagcacaagcatgtgcctgtgtgtgtgtgtgtgtgtgtgtgtgtgtatgtgtgtgtgtgcacgcacatgcgtgtgtataagcccacctgagtggggctcgtgcaggagaactgaggcatgaaactctggctcaaacctaggaattgagagtgtttctgtcttttgggagagtacttttctccacgagccctctggccactgtgggagggaaggacaagggttcccttggaaatgtgaagggtcttggcctcatccctcaggtccccccacagcacttcccactactgctgctgtccctgctggcagcctctgtccctccagaacggctaaccagagcacactgtccccaccgcctcccctttctctctggaaagttgaagtatctccaaaggccttggaaatggcacaaaggtgataaggagcaggtgctttgctgcagtctcccttgcaaatgtataattaaggcctttcttcccaccccaagtccaagaacaaatgccagccacgtcctccgccacttggagagatgagaacccagtggggtcacgtaaaggaattgcaggtcggtgagaggacaagagggactcccatgttctaagcacctgttcctggccaggctctaggccaggctctctaagcacatttctcctttcattcccctaaaaacagagtgacctggaagtagatgttctttgctccttgtcagagttgaagaggctgagacttggcccactgctaagcggcagaggcagggccagccatcctgtcgcaagcccgtgctggggctgccctttctgtttccagtccagttacggacttcccggccgccactgggccctgccggtcaccaggccactgtgcagtgggcgcagagcatggtcaggagtggcctgcccgtactcctccacccagatgagggccctccagagcctgcaggcatctgtggggaatcccagcctgcaggttcttggagaagcaggtgaacctaaggatgaaagcaaaggagggccttgaggaagcagcccccaggcctggcagccacgcagcggctgagctcatgaacttggttcgcagcctgccttgcccctggaggccacgccaggtgctcacccctgagcccacagcccctgcttgggctgcctggcaccctcagggtggcccggcctcctcctgccactctgagcacatgtccgggggttgccaccagagacggctttgttctcccagctaaggccgtggagctgctgtgtgactgtgtcaggcctggacaaggaagacccttagggatgacgtccccgctgcatatttattcaaggtgactcttgtacttggcaagggaagtccactgtgtgattgtctgtattcttaatataatttgttaaataaacgtttgttttaacccc

SEQ ID NO: 268 - DNA, 2248 bp, Homo sapiens
tgttaaggcacagagaacacaggaaaattattccattccaatttcggcttattttataactggaaatgtgtacaggaatttagaaatggaaagtaaggataaatgaaatggttgagaaaagatgacataaaaggaatgaatagtagaaccaaaacaaaacattgagaatcttgtgacagtcttaaatccagtaactaaatagtatttacaaatagaaaaacatgtcctggacaaatcagttaaaagatgcagattctggctgtgacataactggcttattattaaacaatttccgtctcagagcttcaacgtcctcatttgaaaaataaaataataaggccctttgacatcagagttcattgtaacgattaaacacagtaacgtgtatggatttatggtataatgcaatataccaatgcaaagtttaatgaagatacttcaacagtgttgtgcctttaaaaaattgctcttgtgtattgttcaagggaatcgttttttatagtcatttgttaattcattgttcatttattcaaccaaacattcattgagcattttctctgttctagatatgattgatgctagacactggattccccttccccttcaagaacatactatttgttagggaaaacaatacgtaggcaactaatttattataaatgcagttgtaagtgataaattcatctctttaaaactattttaaaattctgatttatcactagttctaactagccttccatcagtcattccaaagtaatggtctgtaatgagaaatcactatgtataattatacacaataaaaatatatacaacaggtattttgataatatgataattaaaccaaatatagtcattgaggcttagaatttttaaaaactgtattatatattgtaaaatcccatccttttttttttttagatggagtcttgctctgtcgcccaggctggagtccagtggcatgatctcagctcactgcaacctccacttcctgggttcaagcaattcccttgtctcagccctccgagtagctgggactacaggcacccaccactatgcctgaccaacttttgtatttttagtggagacgaggtttcaccatgttgatcaggctggtctcgaactccagacctcaggtgatccacccgcctcggactccctaagtgctggggttgcagacatgagccaccgtgcccgcccccatcttttcatttttatagcttcacctaagttttgaattaaaagaaataaataattaatacccaaaatattgttttatatcaatgaccaacgtaatgaaacactcagcagaaactaaagccctgaagtggttaagaaaaagctacctatcactaaatcaggcatgcttataagcaacctagaagaaaacttttatctgccttgttttggctttcctggcatacttccttacttcatctccattttataattaagttttgggtcacaagtctaaggcaaaggagcttccatactgaaaatctacattttaatgcttattttatcataaaaataatttgggtaattttctgcaagtgacttctaacttaacagtagaagtttaaaactgttcaaagaccaaagcacaacatttatctagtgtttgatcctagtataaaagaatggcaataattatgtgaacaggaattacatgcccttagaatgtgcattttttaacctattaaatttgccaatcttgcaaactattgtttacttgtattgcataattagatactcatattaacatattgaattcagaaaaagttagcaagccaagatgacattctctgtagcactattttaaattataatgaatgatcacataaaactctttagtatttatctaaagtaattattactctacttcatttgtttatctaaatcagtgatcattgatgtttgaactttttggcttaaatgtttattttgtttatactacttgctagagtaaaataaatttaatacatgaaaaactctacacaatttaaaataggttataatttgtcaatacttatgttttaaaatatttttagaaggaggagtgctgtatattattaaaacaattttctgaaattgtttaatattatctttgattttaaaatgacatatatgtggatttacaatgaatcaaattgtcctaaaagatgtcagataagaaatgcaagtgctttgcaagtctaatacttaatgttcttttatgtacaacaaaaatttaataaattaactttaaagc

SEQ ID NO: 269 - DNA, 966 bp, Homo sapiens
gttttatatagctttcttagacataccaaaccatcattcataaatcagataaattattcagtttttgtgtttagaaagctaagtatgtgtagctggaaacaaaaatgagcgtgttttctctcctgttaatctagagtgtgcagttacacatgtgtggataatttcatgttccaggggcgcttggcatctcccatggactgattcccaggaagaaaagcccaaagggaaacccacgattcctttcgagtagatgtgggaaagagcccattggaggatatgaggtcctgtgaaattcagttgtgtgtgtggctccttgttagcagtcatgttgacatggtgttaggaggctccccatccaccctttacatgatgtagggaccacgtgtcttgtgagattaaccttggacacagtggttagcctggagaaaatgagaggccctgcctggacccaggagaggagccagtgacacaggcagagcggtgcagccctccttcccttccatttggaggagttgtgccaggagcctgcccgcttacctctgctgaagcataaatggactttgcttttggggcttatctctgatacatgctggagccctgcctctccactgctagatggaacctggaatctctcatctacctcttagtctgtcagtttctacgtgtgagaagcaagcttgtgggccagtgtccttgtacatgctgtagcacttaaaaaataattccagggttccctggaaaaccagtcccagggttcctatgatctgtagtttctacctggattataactggttttgggtacctgaattttgattggttagccttaattatagtctggcgtgatcatgtagaatcttttctggtgaacagatcataaagttctatcaaggagttctatcaaggcatccatgtcagtggtgctatgctggttacaacttgagatttttgaaataaaaaatttgtcat

SEQ ID NO: 270 - DNA, 1195 bp, Homo sapiens
  misc_feature 360: n=a,c,g, or t
tttttttttttttttttctgcatttcctattggtattttctttgtggttactctagaagcttacataaaacatcttatatcttaagctgataactgaactataattgcatcaacacttttacctttcctctgcttttattacattttacatttttatatggtgttcgttcattattatgatttatgttagaacattattatatatgcctatatatttacctttatcaaggagttgtttcagtgttgctgtttagcttcattggtttcaacctaattccctttagcattccttgtaaggtaatttcagtgatgatgaataccaccaacttttgtctgaaacctcttcatttctcttttatntcaggacagttttgctgcgtttcacattattggttggcatttttctcccaacactttaaataaataattccactatcttctggcctgcaaggtttcagctgacaattctattgatagttgtatggagatttcctgcatatgacaaattgcatttttcttgctgctttcaaatttctatttggtttggacttttgaccatttaatgataatgtatcttggtgtagacttgtggttcacctgatttggtatcttttgagtatcatgaatcttggtccatttctttccccagaatgaggagttttgagccatgattccttcaaataaactatcttttttctttctccttccacgtaaaattctcataatgtgctatgttgactggcaacgtaagtggtgttcatgagtcagacactttccttagtctcttcattctttactccttttgctcttgggtggctaatttcaaattttatgttttaagagttcacatttctttcttctgtgtgattaattctgttgcccactctacttaattcttaaaatttcagttatcgtatttttcagttccagaatgtttttttttcctcataaccatctttgtgtcattctttttgtgtaacactttcctgatttaattatctgtgtgtgttctcttgtatctcactcaacttttttacaatgactatttttaattgtcaggcaacacatagatctccatttctttattgttggttgctagaggtatgttttattctttttattgtgtcttattttttgactcttcatgttctgtacagctttgtgtttgtgtgcatgcatttgaagaaacagttcg

SEQ ID NO: 271 - DNA, 1000 bp, Homo sapiens
tttttggatttatatttttccataaaatgcaaatgctgattcatcagtgagtcagtatatgaaaaagggcctcttaaatgtcttataaacactaattattcttccccagtcttcatttccttaaagtcacatcgctcacaagtaggctcatcttccacttctgccatctgaaggctggtccatgcccagcctgaaccaggggaaatgtgcagaactcaccaaaatttttccaacaccctgacaacatttcatttcaaactctgatccctgccctgtgattacaaagaggatgctgctggttgtctctcacagtccctgctgtggggaaaaactgatatccaatgttctctgaaacatactgtctttcatctagactcagaagctagacataaaatttaaaaaagaagagtgtccatggccatgttatacctgccacctgctagggcccagtcatcagtcatggttgctgatgatgagactgctgaaaagacctgagcaggatgggagagaacaaaggtagttctttttatagcatgaggggaatgggagacttcaaagcttccagcagcctcatcacccaggcttcaccctagaagtcatttttgtcatcaggctagctgaggcttctgggcctctccttgtgcctcttcatattcttcttctggtttcagctgagggccagggatcatcaccgtcttaaggatgggctgcttagggggtgcccatgggggaacgatcttggtatgcattctccagcttccataggggtttgtcaactgcttttcgaatacaacatactccaggacatccttgggtacatcttcctgtccatacatcaaccggccaaaccggtcatagatggccagagtctgccgggtgtgcatgcgtacggtgatctggccgtacacgttgccctggttcatcatacttgaacagcgaacttgaacaacatgagagggctctaaagattccacaaagctccagcggacggtcttagaaa

SEQ ID NO: 272 - DNA, 3515 bp, Homo sapiens
gttttgatttgcacaagtaatccatgctcatagaaactagaaaatagtaaagaaaaagattaaatctcccttaccctgaggcaaccactgttaactgtttttctaggcatgtatgtatacatgcagcccctttattaaaaagtgagttatatatgatacatgttgtcttgttagctgctttcattcagcaggctgttggggccagctttctatgtcagggattatgggcttccgtcatgattttccttttggctacacaatagcccattgtgtggatgtgttgggaatttactaccctcaactgttagatgattaaatgtatgattaattcacaccatgccatgtgattatcccatactgtactttaggtatggtaatcttcacctggggatcttctggtcacataaaacagttttttctctgaggaaattagaactttatacttttctttttgtatttttatattttttcttaagaaatgctattaaaaaataagttgtttcctcagactgtttagctgtaattgtgaataatttgccaccctttgtggcagaagatgtttgaaggccacttgaaggaagaactcgtgtcataaaaacaactgtagttattctttactattcaggtgtgtttgtttccacaggcactgggtgcaagttcctgtgaaatatgccacgaggtgttcaaatcaaaaaacgtgcgtgtgctcaaatgtgggcacaagtatcacaaaggggtaagagctctttttggccatccttacagcatgcattgggaccttcaaatattttcaaaataagaaaggaattgttttctagtcatcagtatttattgtgctttcaaactattttctttgcaaacctcccgtgtcagtgttcagtgcctccctgtcctcacaccagctctgcaggaagggcagctctggagaccgtcctttccatcccttgtggggagaggggaacagcagctccagccactcgttagtgctgagattcaaagcagtattagttccttgaaaggtgatttcttacacacttgactaaatggagaaacagtgaaaccatttttttgacttagtgtagtatatgaagtcagtttaacattttagaggagaaaaactaaacctagctgagtcccttctgcctgacccagggacagtcctgctcgtaccgttctgggatctgtgtgtgaactatcatggtgttctaggtaccgtgagcatttgtgtgcacccctgctgctgggttagaacagatcaggtctctgccatggggatttgctaatcccttggaacgggataaatacagcatgctcactgaaaggaattgagaccacttgccaagtctctggtgtggtgtgcctccttgggtacagggtcttatatttgggctagctgactgtccacagcctctgcagtgtgggcagcagcagcaggagtgtggcgtgcaggctggagggctgttccagagccaagggccaaggccaggccaagggatgggctaagaatgagtgattgggtcatagggccgagaatgccaggctctggaatttggcgcagctgaagtggaagagccgagcctggaaccggggatcagggcaagaccaccccctgaggccaggttggaggcccagagcgctcaggatctgaccctgaggtgggatcgtttgcggctggggctttgtccacactctggcctgagcgggtgttggtgtccctgagtattgggcagctccaggcccaagagaccaagggcaagtgagccacgcctgccaaggagcccagcagcacaggggagctaagcttcctcatggtcctgaaggcatcttctgattttgttttctccttttcagtgctttaagcagtggcttaaagggcagagcgcttgcccggcctgccagggtcgtgatctcctgacagaagagtcaccttctggaagaggctggcccagtcagaatcaggagctgccttcctgctcttctaggtagtcacacttcactaaagtgtcatccaccagtgtgttgaatccgaagaatgacaattttctaccactggtgtaaaaaacaaacatttgaagacccttgtgcattgtgtgtcacaaagctaaatacatggaaatcgttaatatcgctgatattaagtaatttccccactctgagtgaatactttgatgattgccaacagtggctaataaaatgacggctaccacactcatgggtcactggggctgcgcagggctctttgaggtgggtggcttcttttggaaagtactatgaacgtctcgaagcagtattctagtgataagaattcttaacatagccaagcgccccacgtttgttccccacgtttgttccccttttctgtttgaaaaacctgttctggtagctccacaagagagatgatactgactttttaaattttttacaagagtctgtattcctgatatgcctatatttttcctcaaagattctgcattttaaggatgggcataagcaaactatattttaataatttatagttaatgttaaaatattggctgatttagaccaaaagattcaaatctcctctttgtgaaatcccatctgcatttgattttttattattttatgttcccccgttagattgttttaagtgtttgcttttcatcttttatagatgtaatctgattttcaaaaatcattaacactttttaattagtatcgactaagactttttccccctggaatcgaggctgtgtgtccgtcatcccagcccccggttggagcctgctctttgaactccgctgccttccttagcagcttctgtcctcttctgtgagtcagtcagcgagtgcttgggatccgcatccagccgtgctgagcacacaacaggctgtgtgtggaaatggccaccaccattctccttccccaccccaccacaaaaagagaagctgtgtctttagacaaccctgaggtatctgtgttacaatcgttctgtgtttgatatttgtgtaaagtatgcatgcagtcttgtactgtgacctaagaacaaaactgtaactgcattagaaaccatgaaaaaattagatattgttttgtgacttttagacagtggtaaatatagaaccatgaattctggtcacattccatttctctccaacatgaaggatcaaaaaatgtttttcaatgtgttctttgttccactggaaacttagagtcatgagtttatgagctgatttggtcaccttcctctgcctttgttcactgtgagttctgatgtcttagtgacttagttcttagaagctcacgccttagtttgaaacagattctccacggtggtccccaaaacactgtctgcatatccataagaattgagcgctatgggtgttaacgtgcatgaggatcagtttgcagcagcaagtacaaaaggagaagaggaacatccgttgaatgagtgtgttttgtacataacttcagatacttgtgaacatgccttatatttgtccaacaactgtcagaataaagaacattctaaaatg

SEQ ID NO: 273 - DNA, 2317 bp, Homo sapiens
  misc_feature 1023: n=a,c,g, or t
gtgagttctatcttaactgtgtatttccactcccacccccagctctaaattaatgaagaaataggaacatatctgagggatgcctggccaagcttgtcattggagtctggcccctaagttccatctgggaaagggctacagggtcccaacccgaagtcccacattctttatgcttggtatccagatgatttatctaacactttacttcggtttgcagcctgccttcactcttcgttgagttattcttcatgcagatgacatgtagtatactgtttgtggctctggacgcaactggagagaaaattactgaaggatcttgaattaaattgtcttagaaaacagagactgctgaaggttgaagcagctaccacacctctgatcagaaaacctaaattgagaggaaaaggggcaattcctccattaggtattgactggctgattttgctggtgagatttggagaatctctcagttgcaatttgtccttgccctctgtggactctggttggatgcgcgcaagacatcttaacatgtccacgttgctgatagatgagtgtttgtgtgtgtatgtgcacatgcatatgtatatgtatatagaacctctcttatagataatagaagtgcatgcacacatttttctaaccagtgcgacacatggcttcaccttctgttgtcctcaggcctgcccattccaggatggtgggccccaatttggtggaccctgcctgcctgaggtcacccagaggagttatattcatttttgtatctgtgtcctgaagccgtgatgcctaggagcaaaggaatgatcagcgtcccggctggaggacaagtgtttgtggtttatttgcatttcagtagttcggacactgcaggattttcccgagagacaagcaaagagagtccaagctgcgtgtccctcactgcgcccccctaccccctgcaaatgcccacttaggggctggaacggccagccccctccacctcggtggttcacagaagatggctgagggatgcccttcctcccnatcaacattgaagtgtcctctgctccctcacaggggccttggtgttggaatttgtgatgtaacttcaccagtccttgggtcagggtgcagaaaggggatcagcagccctggagtatttcagctgcctgcatcttgaggaaattggagttggcagtcaatgaaacaggtgcttttggacctggggaaggggtgtgcccaagcgtgcctgcctctaaattgcaagaggcagctgctggggaggatgttccctttccaatctctggtggaaggaggagaaaggttttggtagtgtcggtgggggacgcgatcattccttggctctgcctctccattttctgggatgagatttcggaagtgctccaagaggaggagcttagagtagggcagcctggctcagggtgctccctgaggtgtgcttctagtctccctcacggccaagccttctcacggtgggtgcaggtggataccctggtggccacacagggtcgtggggtggcctgtggggaatctctggatggccgtttgtggaagtgatggtagaagtggtctcaacccaaagatgagcagttgcccatgttcctggaggcccctggtgaacccacctcacttcctgcagcctggcactcctcagtgaccctctctggatccattagggcctagatggttgatgaaggatgctggacaggctctttcacctgcatgtgaattcttaccctcctcagccacctgcaaggactgctgtctttcagctagccgcccacatagaggccaaacgtagattcgaactgtttttatgtctcccgtgtaatgaccccgaaggaactctttaaacacagctgtgcaaacccttgtgagacctgactttcccttttcgttgctcttctttccaaggacacctacatgttcacccccaagccaaaacccgtggcaacaagggactagagacccgtaatggccatcgggtgcccagacaaaacagtggtgtctgatggagaatgagaatccaggagtgggaggtggggcctggggagctccatcgccctgcctggcatttctaggtcccccagatgctctggggcagtgagctgagccacgtggcacacccactccctctctggtcctgccttggggacccaccctagacttgcagcttttcatggtaacctgcgtgttcacttaaatgctttgctttccctttctgctttatgatgatgattgttggtatatattttacaatgaaatggaaaacaagttccagtcattgctggttcctagaccttggtaattaaaagtt

SEQ ID NO: 274 - DNA, 1267 bp, Homo sapiens
cactgctttggtgcctttttttgttttttggctcggtgttttgactgcaagtctttttggatagaattttatagttagaaagtagctaacacttgggttttataggcacaaaaaacaagtcttatactagctgtactttattttttgagttcttattaatgaggaacatccacttttgcattgacagtgatttcaagattgctttatcagcctttaaaggattcttgactagtcgtgcacatcagaactgccaggtccccagtggttctgaagcagtaagctttgggtgggctctggcatcagcactttcactaagcttcacagataattctgatgcatactccaggcctgaaccactgatcaatttgaaacatgcataacaaagcaaaaaaagttttgtttcaccttttgaaatacagttaactcttttaccatgccagagatcattcagagagacaggtcgttgctccggagtgatacagatctggcagtacccagccctttggtgtgtgcgttagctcagcacctgcccacactgcgagccccgtagatgtgccttgtcctccctgtttcagcacttaacacactacctggtacagagtatgtagtgggcatctgttgaatgaatgcttttccccgtagcagtgtattcatacaatattaatataattgtcccctggcttacagataaaaatgaaagcatcaagtgcccagtgagtgagacccaggtgttcttcctccacccctagtggtcccctgggcaggtcttttttttttttgtaacactcaccagtctgttctgtagtcaatcattgattgacttgtctgtgaacttgcaggaactgtttcatagtttcattagcacagagtaaacatgtttgccatgcaaggttattttgcatctgcatttaagtgataatgttgaatcaatgaaaagtgttgattaagcagtagttgtagatatgctaagtttttcaaattactaatatcaagtggagattgtttttacttttaagggtattgcttttgtgatagcataaataatggttttccttttttgtaatgtaaattaattgctggcaacttttgtattcccatagactggggaagcttaattgcctttacaagtacttatgtacaactttgtatcaaattttctgtaatagtttatgctttagtactatatatgtactaataattttatctgacttctgtttatatcatttgtacaattacatggttgtaaaataaacttttaaacctcacg

SEQ ID NO: 275 - DNA, 1439 bp, Homo sapiens
  misc_feature 794,1437,1438: n=a,c,g, or t
actagatagaaacctttatttcacaactttatcatcattcacattctaaaaagacacggactgggggacacagctgaaaacagtgggaggccagatgctggcatcttccagacgggagcatagccatggtcactctagccgatgtctcctggggctctcaggcggcaaggaccagatgcaccactactgtccaatcccagttttacttagagccacctccttttttggggccattagtccttatttcatgccagattttcactagcggctccctgttcttccaaatcagttcatgaccgtaagtaacataccatattccaaaaagagctcccccaagatgtgccgcatgatcaaaaaatttccatcccaggatcattcctgctgtatccatggcgataatggctttcagggcattccctgctgtgaacgtgaacatcggaaggaaaataatggcaagcctcccttctgggatcttagtgcagacagctgcgaggactgtcatgatgcaccagatgcaccaagtgatggtcatatcttcctgtggcaactttacccaggtaactgacaaattggaaataacacctgcagataggtacactgccatgaactgctcttgacccagaatgttcactatgctggaagagaagctccacaaaacatacatatttgctgccatgtgaaataaggagaagtgactgaatgttgacagcaacattggagaacaaggacctttgaggctggattcgatgtgaaatatctgatcattgtccgctgcagagaaggtactctccatnaacagaatacaaggacatttgcagctataatacctcaggttctctgggaaccaggcaggtgcaaagatcaacctgttggcctcacacagtggctatcatttcttttcctaggcagtatccaccaaactaattaaggactgggtccacagctaccttttggtttgatttctcttcccttgaatggttaaaacgtgtaagctaacacaaacctgtcacagtccgctggccatcacttaggttattccaccacttgttaatctcctttctgaagtctccttctttttgtggtcttatgctatccaaccaatcagcttttataccatcaaaataactctggaccctggatttcagtgattcatattgccaaatagcagctgatccaaatgcacagcctgtaaacccaacagtaaaaaataaaggttttatgagactccttataggatagggagaaggataaaagactgtttcttccacaggaggaatcaaagcacttctcttgtatgcttcaccacttgtccctgggtctgatcttcgaggttcaaccttcctgggtgcttttctgaatccgcatttttgttgaataaagaagttaaacctgcgtccgaggagctgcggcggggttaggaccgcagtgagctccttnna

SEQ ID NO: 276 - DNA, 2035 bp, Homo sapiens
tgaagtctaatttatcagtattttctttcataagatgcttttttatatctagaaactcatcaccaaattcaaggtcacatagattttcttctatgttttcttctagaagttttatagtattgtgttgtagttttaggtctatcatctaattcatgttaagttttgtgaaaggtgcaagatctgtgtctagatttatgtttttgcctctggatgtcccagtgtcccaagtagtagagaactaccacttgttgaaaagatcatcctttccccattgaattgcctttcctcttttgtcagtatcagttgactctatttgtatggtccactgttcacttttataatgacaattatatttttctttgtgccttaaaaaatgcttaattgagacgtagtcacataccttacaatcgcccgtttagagtgcactgtttaatacagttttttagtaaccatctccacagtcaattatattaaaagtcaactttttaatcttaccagaattctttaatttttcagttcccctcactgtggttaatatctctcgacttgacaccacttccttaaggagaacttcagcttctccatccttccctaattgtttcttttcataattgcctgttttttgaatataatagtgtctctgttatttctaaagatactgattatatttagtatgttcttcttggttttgttagcattagatatattgttgagtagttctttcatggtgttggttttcctggaatatttagtgatttgggattgtctgctcaacttgagtgtttgaggatattggtttgcttcttggtgaatatactgattatgggagcatacctctggtgacaggaaggagtaggaactgctgcctaatgtatagaggtatgccagtaagttctcttttgactgccaagttcccctgcctgctggggtggtggttaaaatccctccctccaccatgctctgagcttcagcttaggctgtgcttgcctacttctcagaaaaaggccactcagaagggtattgggattcacttgtgcaaagatcctgggtcaagttcgcctataatcttctggagatcccctcagggtcctctcccgtagtctagattctgagtttggagcacagcagaatcactcttaccttcatagagacctctactgggcatatctatgctaggttttctcagacttctcagtcactatgtctcattaactttttaatcttataagaattcctcgatttctgaactgcggatagcaagatagtgttctttctttttttccagccgagttaaggatttcttactcacttaatggtaacaatagtagcaataccacctgccactaataatagtgatttaaaagggattataggcagaaatgtaagtagatatgtctgttcagactgctgtctgtcttgaaacaaggttatcttttcaatactcatagcttttagcctttagcttttagtcttattatttctagaacacattctattttgacagcttctaacatttttgcagatgcatgtctgcctttctgaaagcgtggatgaaagccaaatggcaacatttgggggaaattggtgtagggtggaatttactttttcttactggcagagtatgtgctaagtattcatataaattagagatggtataggaggggaattaggtggttgaagattaagatgtatctattcccagcactttgggtggtggggatggggggatcacttgagcccaggagtttgagactagccagggcaacaaagtgagacttcctctctataaaaaaatacaacaacaaaataattagctggacatggtggcgtgaacctgtggtcccaactacttgggaggccgaggtggaaggctaaggtagaaagatcgtttgagctcaggaagttgaggctgcagtgagctgtgtttgtgtcactgcactccagcctaggggacagagtgaaccctgtcttcaaaaaaatacataaataaaattacaaaggggtggagacaagggtaaggaaaaaagaatgtttt

SEQ ID NO: 277 - DNA, 1370 bp, Homo sapiens
accttatacagagggttactgtaaccctcattctataaataagcaaatcaaagcagaggggtttcatatcttgctcggtgtcacacaggtgctaaatggagggtttgggatttgaacctaagcactcaaactgtggagttttggagtttgaggtgctatcttcatatgtatcttcagtactgtttgtgtgcatgtatgtccttccttgtttcagtgccatagattatattctaatgaatttttttggtatcacattttacagtgacatttgaattttctttcaagtctcatattcatcagaacaatcagaagtggaaatagctgtggtttgaatactttgatcttgtctacctaaataacaggctttctaaaagaaaataatgtttatttgggaatagggctttgcagtgggaattctgttgttacagtaaaccatgtgcatatacagggaggtaaaagaagaccaaagtttttaaaggaaaaatgaggaggatttcataattattttgagataattattcttggctacaagggtcaataaagtgcctccattctgaggttggaccggcagttgctggcagatgtcctcacagaagtttttttttttttaaaaaaaacaacccccaccacccccccaaaaaaacagtgttactgtgttgcccaggctagatgtaaactcctgggttcaagcaatcttcctgcttcttgggtagctgggattataggtgtgtatgtaccatgcacctggcttgttttgtttcacgttttgtataaggttgtagtttttgcagagtcttttgtgatagtttttatcatgcatacccgcatgacagcccttccttcatagccttccctggctgtttgtcagggtgttttttttttgttttgttttgtttaaaaaaaaacagaacaaacactactactactccagtttgattctgataactttcatataagtctgttcatcaaggtgttgttatccatccaaactctttgttgccttaatagattttgtttttgtgtgtaatttcagtaaggcagctcttactggttaatgtttctggtaaaaatttgcatgctaggccaggtgcagtggctcatcatgcctgtaaacccagcactttgagaggccgaggtgggcggatcatctgaggtcaggagttcgagaccagcccagtcaacatggcgaaaccccatctctactaaaacaaaaaattagccaggcatgctggagtgtgcctgtagtcccagctactcggtgaggctgaggcaggagaatcgcttgaacccaggaggcggaagttgcagtgaaccgagatcatgccattgcactccagcctgggtgacagagcgagactctgccccccccc

SEQ ID NO: 278 - DNA, 988 bp, Homo sapiens
  misc_feature 568,569: n=a,c,g, or t
gcggggactgcaggcaggcgccaccatgcctggctactttattagtaattcactgctacaaagtgagagcagctcccagggcacagaactccccacacctgcaggctgcccgcagccccagcccacaccttggtcttgtccttcaagtccagagactccatgggcttgttctgctgccggccaaagacctcccgcacccccagcccacaccttggtcttgtccttcaagtccagagactccatgggcttgttctgctgccggccaaaggcctcccgcacccccagcccacaccttggtcttgtccttcaagtccagagactccatgggcttgttctgccgccggccaaaggcctcccgcacccccagcccacaccttggtcttgtccttcaagtccagagactccatgggcttgttctgccgccggccaaaggcctcccgcacccccagcccacaccttggtcttgtccttcaagtccagagactccatgggcttgttctgccgccggccaaaggcctcccgcacccccagcccacaccttggtcttgtccttcaaggccagagactnnatgggcttgttctggcatcgcctgtggaggtgacatcttccggatcagatcatgggcgacaaccaacaggtcccggtcctttgtcactttcctccggaactcggcgacgtctccggggtgcagcacctccagctgctctgcagcctcgatgacggcctcgatgcagcttctccacgagcaaagggcagggattccgggggccactgctgcgctgacgccagtcccgataaccaggagcagttcctggggctgtttccggatgaggctttttaaaaactttctggatttttgttcacttctatttgttgtcttttccactgaatccatctgtgaattctgcggcgcctccgagacgctggtcccagctcgcgctgccacctcttcgcctccgcagccggctacgcctccggggtctctcg

SEQ ID NO: 279 - DNA, 2581 bp, Homo sapiens
ttctcattgcatcccattgggttgcacacaacttcagatagtcctcattctaatgcagtcttgttaactttgatcacttgattaaagtggtttttgccagacttttccattgtaaaataaatatttttcacttcataattaataaatacgttgaaggcggtactttgagactatgtaaatatcgtattcctcatcaaaactttatgttagtggattcctcttttatgcactagattatagtcagccacagttttgatgcttatgttatcctggagttggctggtggcaacccctgcagtctggcttgtgtgtccttttgacatgtctcattattctcggaatgcttccatatgttctgacacaagatattccaggcttatcttgaatgttccctgcattagtcctggaatcagccatttttctgaatcagggctctttaggtggagatccacccacctcggtctcccaaagtgctgggattacaggcatgagccactgtgcctggccttagataatgcacatttaaatccctatgtcaggggctgggcaccgtggctcacgcctgtaatctcagcactttgggaggcaaaggtgggccaattgcttgatcccaggaattcaagaccagcctgggcaacctggcaaaactccgtctcaacaaaacattttaaaaaattagtcctggcatggtggcatgtcgcctgtacttcgggaggcttaggtgggaggatcactggagcccgggaagtcgaggttgcagtgagccatgattgcacaactgcactccagcctgggcgacagagcaagactctgtctcaaaaaataaaataaaataaaataaagaaaagaaaaggatgtctttcccacaataataaaaatgaaaataacaagtagtaaaacttacctctaaatgaaaaaaaaaaaaaaacacctgcctacttagggcagtaggcagtgcatcattttcataaaagaaaaaaacaacccacagcaaaaaaacctctttttctgcgaagcagagaaaagaccagattaggggcatataagatggcttgatggggagaaccaattttattaaaaagttgggtttccttaaattagaaatttaataatctttgggaatttaacacgctgattctatcaaaaaatatgtatgcaaaaattgccaaaaatgttttgaaaatgaataagtgggaggattacccttcatggtataatgaacccatgaagctatatttatttatgtactgtgtatttacatactatgaagctgtatttatttacagcatctggtgctggtaatgaaacatattaaaaatagtagaacagaacagattcttgaattggaaccatatgtgggagtttatggagtcaaagtagcatttcaatctgtaaggaaaggataaaacactcagcaaagtgttgggggcatttggccgtttagtaataaattagactccctatcctgtattatatacaaaataactttcagatttattgaagtgataattataaaagcaagcccatgaaactctttaaaagagttatcatgcttagaactagcttttattatcagtttggtgaatgtctttccagaaatgtactttgcatgcattaaaaatttgtatttgttgacttttttttttttttcctgagacgaagttacactcttcttgcccaggctggagtgcggtggcacgatctcggctcaccacaacctctacctcctgggtttaagcgattctcctgcctcagccttcagagtagctgggattacaggcatgcgccaccacacctggctagttttgtagagacagggtttcttcatgctggtcaggctggtcttgaactcctgacctcaggtgatccacctgcctcaacctcccaaagtgctgggattataggcgtgaactaccacgcctggcctatttattgacttttttacgaaaacagaatttactctgtgttattttctgaaaattgcaatgggtatactataatatcatcaaatcccattatgatttggattttatttatatttttgttcttgcagtaattctgcaatgaacattatgaatataatcatgtactcttgggtgaggggatatgtttctagaaacagagttcctgaaccaaaatagacttgcattgtattttggaagatactgttaaatcaaacatttgatgagccatgttaaccaaggtctttggatttgtattctgaaaactaagagtaatatttaatgaattttaatcaaggcaattatattacatttttatttttgatagaatactttgggaggctaggcacagtggctcacacctgtaatcccaacactttggaagcctaaggcaggtggatcacttgaggtaggagttcaagatcagcctggccaacatggcgaaaccccgtctatactaaaaaatacaaaaattagccaagcatggtggcatatgcctgtagtcccagttacctgggaggctgaagcaggacaattgcttgaacccgggacacggaggttgcagtgagcagagattgcgccactgcactccagactgggtgacagtgagacgccttctc

SEQ ID NO: 280 - DNA, 1266 bp, Homo sapiens
cagagctccggcagcgcctaacacatgttgacagtccccttgaggctccagccgggcctctgggccaggtgaaactgactctgtggtactacagtgaagaacgaaagctggtcagcattgttcatggttgccggtcccttcgacagaatggacgtgatcctcctgatccctatgtgtcactgttgctactgccagacaagaaccgaggcaccaagaggaggacctcacagaagaagaggaccctgagtcctgaatttaatgaacggtttgagtgggaactccccctggatgaggcccagagacgaaagctggatgtctctgtcaagtctaattcctccttcatgtcaagagagcgtgagctgctggggaaggtgcagctggacctagctgagacagacctttcccagggtgtagcccggtggtatgacctgatggacaacaaggacaagggcagctcctaggagctggcgagtcccagcctgactgctctgtcttcctgccttcgtctcgctccatcaccgcctcaatgtgatgagcctaaagctagggtccaagggcagagcctgtgcccttcagccctttcacctaacaggcccatattcgggcctttgcctgaccaaagagaagaaccgtatgttccctttactgcacggcctttatccttctgggcccctggggcggggacctgagctggctgtttcctgctttgcctgcacattgttctcccttcctcccaactcctcagggccttctgtatctgtgcctggccagtggcagcactagcagtggtattagcttatgccaaatacagctttggaaggatctttttttctttaactagatggtcaccttcttccctaccacacatgggtgggaaggtggacaggctaactctccagctgtgagcctcttagactactgcatgtagcaaatgttcagcagctcaggcccccatgtccagttctgtccccactgtcctcaaccctgtcctgaaaattctactgctttgatggctggggccagtctcttgtcactttggaaactgaggacgcgtggattctactcaagcctccaagtagtggcatatcagtcttggagctcctagctggtgatacggagagggctttggaggacttgggacagcagggccaatttttttgcccaagtgcctaggctgctaactcactgactagaacttaatctggtactttacagttttgcaccaactctgccaagccactggatcttacattaaacatcatactc

SEQ ID NO: 281 - DNA, 2663 bp, Homo sapiens
  misc_feature 2619: n=a,c,g, or t
cgtctccccatggcccttggtacatcctccccttctccacccgcacctccgtcttccccgcaacacatatacacaaacacccggaccctaggtcccccagagcccgaagccacgcagggggcgtccagcgacctgcactactgggtcgggaagcaggcgggtgcggaagcgcagggcgctgcggaggccttccagcagcgcctacaggacgagctggggggccagaccgtgctgcaccgcgaggcgcagggccacgagtccgactgcttctgcagctacttccgcccgggaatcatctacaggaagggaggcctagcatctgacctcaagcatgtggagaccaacttgttcaacatccagcgactgctgcacatcaaagggaggaagcacgtgtctgccactgaggtggagctctcctggaacagctttaataagggtgacatcttcctgctggacctaggcaagatgatgattcagtggaatgggcccaagaccagcatttctgagaaggctcgggggctggccttgacctacagcctccgggacagggaacgtggtggtggtcgtgcacagattggtgtggtggatgatgaggccaaagccccggacctcatgcagatcatggaggctgtgctgggccgcagggtgggcagcctgcgtgccgccacgcccagcaaggatatcaaccagctgcagaaggccaatgttcgcctgtaccatgtctatgagaagggcaaagacctggtggtcctggagttggcgacccccccactgacccaggacctgctgcaggaggaggacttctacatcctggaccagggtggcttcaagatctatgtgtggcaaggacgcatgtctagcctccaggagagaaaggctgccttgaacccgggctgtgggcttcatccagccaagggctacccgacctacaccaacgtggaggtggtgaacgacggcgccgagtcagccgagttcaagcagctctttcggacttggtctgagaagcggcgcaggaaccagaagctcggcgggagggataactcgcttcatgtaaagctggacgtgggcaagctgtcacaccagcctaagttagcggcccagctcaaggatggtggacgacggctctgggaacgtggatgtgtggtgcatccaggacttacacaggcagacgcgtggaccccaagcgatatggacagctttgtgcaagcaactgctaccttgtgctctacacataccaaacgcttggccctgtccaatacatcctgtgcctatagcaaggccaacaggccactgaggatgagatagaggccctgaacagcaacgctgaggaactagatgacatgtatggaggcgtcctagtacaggagcatgtgaccatgggcagcgagcccccccacttcctcgccatcttccagggccagctggtgatcttccaggagagagctgggcaccacggaaaggggcagtcagcatccaccacaaggcttttccaagtgcaaggcactgacagccacaacaccaggaccatggaggtgccagcccgtgcctcatccctcaactccagtgacatcttcttgctggtcacagccagcgtctgctacctctggtttgggaagggctgtaatggtgatcagcgtgagatggcacgggtggtggtcactgtcatttccaggaagaatgaggaaacggtgctggagggtcaggagcctccccacttctgggaggccctgggaggcccgggccccctaccccagcaacaagaaggtccctgaggaggtccccaacttccagccacgactgtttgagtgctccagccacatgggctgcctggtcctcgcagaagtggggttcttcagccaggaggacctggacaaagtattgacatcatgttactggacacctgccaggtagatcttcctgtggcttgtggaagctgcctgtgaatggaacgatcggtggactaagggccaggagttcctgaagactctcccatcaggggggagaccggacacacccatcggtgctggtcaagcaaggccatgagcctcccaccttcattggatggttcttcacttgggacccctacaagtggactagccacccatcccacaaggaagtggtggatggcaagcccggcaagcagcatcaaccatctctgagataccagcagaagtcaacaacttccggctatccagatgccgggcaatgcagggcaggtgccgtggccctgcaggccctcaagggctcccaggacagctcagagaatgatctggtggaagccccaagtcggctggcagcagaaccagcagctccgtcagcagcaccagcgccacgatcaacgggggcctgcgccgggaacaactgatgcaccaggctgttgaggacctgccagagggcgtggaccctgcccgcagggagttctatctctcagactctgacttccaagatatctttgggaaatccaaggaggaattctacagcatggccacgtggaggcagcggcaggagaaaaagcagctgggcttcttctgaacccaagccctctcgactgcccctatcccctggaccccaacatacctacaatgctggggaggccctgcttccactcccctcagaggnttttggtcatcctctgcgtgtcagtaaaagcaggcagcccaggg

SEQ ID NO: 282 - DNA, 1882 bp, Homo sapiens
  misc_feature 1749: n=a,c,g, or t
ttttgtgaatcaatacaaaatatttattttttttcaaaccacagaattcttaaccccagagccacacaataaagttctcagaattgtaagccattaacatttttctaaacaatgcagtccagagatgaagataatttccaaccagcagggatgcaatatatagtaggttcccctatgaatgaagctcaaattagcatttcctttaattctcccacagccactccatcaacagaagcagaaacagtacacatattcatgccactcggctctgaaaagaggttcaaggtgggtcaaggtgggtcttggccagtggaggaaggaaggtgtccaggactttagttaatcaacagtggggacagagaggaatgatttcccttggaaaacaacagggttcctttctcatattcttgtggccagaaactggggtgaacttcagtggggtaatgaaagaaacaggagagccatttctccaggaactcctatgacctccattttaacttctgacaaagttaacttcatttatacaatcgtattgaaaacagtaatcacaaccaaaaaggtcctataaacctgtaatagatgtcaaagggattcacattctgaactttaattttaaggaccctttaaaaggcctagacttggattaaagtaaacgtaatattccaagctaaaagaggcaccataaaaaatcaactcaaaacatccaaacaatggctagatgactaatgtagggtgttttgctttttagttgcaaagcttttcagtatctcagattagtgtatgttcataaaacaatgctcagttattttaatagctgcttatgagacaataacagtttaactcaagggcaatgcctcttgcataataatcacaaaaataattaactgctataaacgggaaaaaagtagaagaaataagccagcctcattattaaaaggcaaatctgggagggtactcggcttaaaaagagataaccaggattatttaaatactatatacaaggtgctcttgctcacttctaactgcagaacccaattttgtttgctagatcaccattccctttgctagtatgcgtacagaccaccactcggaagttttccttttgtgctgaaaaacgttcaaatcccttgtttggtcagtacagaatattgcgaggtgatgctcatgcaaactcttcctgaggaatttatgtgtgcaaatctgcaacccgacagcatggcacgcagcccgggagtggtagctgcacagtgtgagcactggagatggatgtgcagtgtgcagtgttcacagccatggacatccattcttctgcactctcatctccccacaaattggctttcactctagcccccaaagggagggtaattgctgcaaatttgttaaagggacagaagaaaaagtcgcttgtctacaaaataatgcacaatgcatgcatctgggtttgtgtttcttctcactacccttgcctaagacccattgggataaaagtcacaacaccaggttttgctttctcccccacaaaaaaacagtagttaattcctgtcaggttagggtacaggtgtgacaacaaaaggtcacaaaatgacaatgttactgaagcttaaggccaacctttaaaacatgtaccgtctctcaaaacaattatcgatttacttttacatgtcattttttcaagatgactgacccggctttccttttaaggagccagtttcaggctgcacatacatactagacagttgaagcaaatcngcctttgactacccagacaacctgcctgcatgtacggttttgtatcttcaatgatttgggcctttagtggtgtggtacaaaacccagtttgtaattggggtagaaaaaccatttactgtactggcaagaatac

SEQ ID NO: 283 - DNA, 1886 bp, Homo sapiens
gaaatgaaaaggagtctatagtgacaggaagcagatcagtgggtgcctaaaaatggagagtggaggtaagggaggtggattacaaaggaggcagaaacttttaggggagatgaatatttgtgttattctgattgtggcaatgatttcacagttatatacatatgtcaaagcttattaaatagttcactttaagtatgtgcatgttactatatgacaattatacctgaataaagctgtggggaaaaaaaccaatcagcgcttatccatattttactgaaggtgttaagtaagatgctagtaaatgacagaatttcagctgagccaagtctgactcttgaaaactacatttcctctttagtgcagaaaatatttatgagaatgggagcgtagaaaaaatgaaatcacaataaaacaaattagtttctgatttttggacacggtctcattttctaaattatcactgtcagttttttttctgctgcttctagaacatgtttattttgcataatttctctggcttccaaaatctgaagaattgcctctgtttaaactctatttcttctttcgtgtacttgctcttgatttgctgaccttctaaatggggaccagcatctaatgcttaatgcagagtgctggggacatggggaggcaggaggagctggaggctgcgtcatggaaagaccttggcgccccctcaggaaggaaggactggcttggcaggatcccaggctgttttcctggttcagccctcccgaagacattgtgttctctgcagccctggagggcctctttctctcaatttctcagtgaggtacctgttttgtaatcagtcctgtcaggtgaagcagccatgttactactggacaatcatggattatcttttcccttccttcctggatccaggtgtctgaatttataccaccaaaattcttccagattttctatctagtggttcattctcttttgtactttgtagtgccgttgtttattctcatgattgatttttttctgagccaattggaaggaatgtctaacactgactgatcaacccacagtgtttaagaggaaaaatatattttagaatcttgagggagttttatttcagtgtatgtgaattgtattggctatgtagcgtcttcattttcattgtaagaagaattttgctacagtgggaccggctgcttctcatcacaaacaggttgtggctcagatattttcccctttggagagcattttcctggtcatattattatcttgttgtctttcgttgcactcattgctctctgagatcattttgttaatgaatttgcttattatactttcctcctttagattacaaatggcttgagagcagggacccacctctcttattcactgtcctaaccctgggacaatgtctcatatgtagtaaacattaaatatttgttaaatgaaattttatgtgattgggggacaagtaaagtgtaagtactttgggagcatctttccatctttctaaaagaaagaaatgaaaatagttgaggagttactggatgaacagtattcctctgttaaatcaatcaatgacataccaatatgtgcttgaaagactgggcctgggccgggcgcgcgtgctcacgcctgtaatcccagcactttgggaggccgaggtgggtggatcatgaggtcaggagatcgagaccatcctggctaacaaggtgaaaccccgtctctactaaaaatacaaaaaattagccgggcgcggtggcgggcgcctgtagtcccagctactcgggaggctgaggcaggagaatggcgtgaacccgggaagcggagcttgcagtgagccgagattgcgccactgcggtccgcagtccggcctgggcaacagagcgagactccgtccc

SEQ ID NO: 284 - DNA, 1439 bp, Homo sapiens
  misc_feature 476: n=a,c,g, or t
ctttcttctaaccatggtcatttgaattgtttttctcctatggataaagtgtttttcctcttgctgatttcaaggttttttctttgtgtttagttttcagaagtttgactttgacatgtttttggtgtggattattttgtctttattctgttttgagttcccttagcttcttgaatctctaggtttgtgtttcttttgacaaatttggaatgtttcagccattatttcttcaagtatttttttttttagccctgtcttctttaacctctccttctgggacttcagacacaaatgctagatcaattttataatcccacaggtgaatgaaggttgttctttttttttttttttcttttttctgaggtgggatctcactctgttgcccaggctggatggagtgcagtggcatgatctcagctcactgcagcctctacctcctgagttcaaacgattcacttccctcatttttttccggntgtttggattgcataatttatgtttttctgtcagttcactgatttgtttctctgtctgcgtcattctgtcattgagttcagccattgagttttttttgtatttctgtcattgtattttttaattctaaaatttccatttggttcttctttatgtcttctatttctttacatattaccacccaatggggacaaatgtccaagctccctacttcagtttccctgaaaaccctccatggaggcattaagggtgctttataacaattcaccaagagtagaactctaggcttcccactgacccttttttccctatggcatttggctggaatagaatagttatcgaataaaagtttctgtcatggtaggctgcccctttcctggtcctttagctaggcaatggacttttttttttttttaatctgtacccattggcgtttctaggttactggtttcttcagcttcaagtctgggatatattgggcaaaaaggaaacccagggaacttaccaccatgtcatttctagccaccttgctttttcttccccacccttcaatgttttgttatgtttgctttaatgtaatgtccagagtttttagttgtactgagcagtaaaacagtgaaaagtatgtctatttcatttttcctggaatccagtacctgagtagtaatagtcttttgtgatatgttccctaatacccagcagttctagtttgtgtgtgagttatgttgtggagaatgtattttgttttcttttgtaataaaatagaaatttgtggtgaattccttataatacttatgcttgaagacagtcatcagtcaatgtgttatttttctcttgttagatcatgcattacagctataaattttttcatgttttccatgcctatagttatttttatgtgcaccctccccattttcatatctatgttgaaatatgcaaaccaaaatttaatacatttttaaagg

SEQ ID NO: 285 - DNA, 1195 bp, Homo sapiens
  misc_feature 1130: n=a,c,g, or t
gtttttttgaagcatagcatatatatttattttataaaatagaaaaaaaattaaagtatattgattgttctttacacattttgattacactgaatttgttaatttaatattagttcaaataaacattgttatttaaaaaatgctgagtacacgattaagctgaattttgttttccatcagaaaaagaacttcaggagtatataatggtctacaggtgcttcccatccaaaacactaggtcttcatcttttgtttcttagaccactcaggtgcttcttttttagtctgtttaaaaaaagaaaaagaaaatccaataaaatgcttacaaggaggacaagagaggcaactcagagaactatatacattgaggtttttttatgtaagctatactaaaaaattgcttttcttaattcagaaaggatacttaagggcgaagactttgtcttttgccataaataatctcccacctggtaggtatatgatagaaaaaactgtgttttcttgctcaaagcctatacttaagattttctggggatgcaattattttacgaattgattttattttcaaagagaattataaaaaaatcaaggacatgacttcttttcagttgtctcatctatatagataacagatattcattcactcaatagatatttattaaataattactgtatccaaattattgtgttttagatcttatgaatttccaagtatttaccagagtacttcttgggtttattactcaatcatttcagcctaaaaggcgacaggctgtacagaatagaaagaaaaaggcaggggaggtgaattacagaataaaacattcagaacttcactgattccagtcaaagttcctattttggctgggcgcggtggctcatgcctgtaatcccaggactttgggaggtttaggtgggaggactgcttgagcccaggagttcgagactagcctgggcaacatagtgagaccccatctccacgaaaagaaaaaacaagttagccaggcatggtggcatgcacctgtagtctcagttaacacgggagatggaggtgagaagatcacttgacgatgggcgcggtggcccatgcctgtaataccagtactttgggaggccaaggacagtggatcncttgaggtcaggagtttgagatcagcctggccaacatggtgaaaccctgtttctactaaaaatac

SEQ ID NO: 286 - DNA, 1601 bp, Homo sapiens
  misc_feature 1490: n=a,c,g, or t
gagcatgtgtctgaggtcacactctctgcccactcacctccttggctgacatcggttgtgtttggtgctgacactctgatcccgaagccagggagccccaaggggctgcatgaccctggggtgccccacacagttcagccctgcctggcagggacgccagtactactgtaactgcagcaggagctgcccggcctgccttctggccccacgcccacaggcgtagtcacatctttgtactgtactcccctgtctcacctggggcaacctcagagcccactaagctgaaggccccctgggggagggggaagcatggtccttatcatctgccctatcttgccccttcctgtggagtgggcagaagggctcccgggatcctcagagctcccaggtctgagcagccaaaggcccagctgggcctccaggaccagcgcgagcccctgccccaccctcccctgccacatgtgccctgctttgtgacctctgttgaccttcctggaagcagccccattaccctgagaatgcggaggccctggcccacctcgccctgtgtttccaggcctgcacgtctggtccttcagctgcacatggaactgcagggcaggctggcggggggccttcagatctcagatgagactgcaccccttcgaccaccctactgggcacctgcctccagcccctgagaactccatcttcccctagttctgcccaggagcccctgagaaccccatcttcccctggttctcttgcccactcccctgctggggctccttcctggcactgaggaggggcgctcccaatgctgtgaggcagcggggagggaccgtgcacccgtggctatcagagcccctccgctgtcccaccctgggcctgggacacgggcctgggggcagtgtgtgtctgctggtcatgtgctggtgcagttggggaggatcagctgtctcggtggattctgagactcactgtgggcggagaggtctcactctgctattcaggataaagtttattttattttctacacatttgccaggtcaggcattttgctagtaagcaggatgcccccaactctccctgccatggaggattcttttttttaagctttgggtgcttttttaatacttttttttttaatgtggggaaggagcttgctctgacgtcaccctcctctcccctgactcctgtcctgagagcgtgtgggtgccgcctcctgccctgcctacccctgaaacgtggggaatgggggccccaggacagcatcaggacttttgagtccggctgccagcaatggttccaactcggaggcagcgcctcttggtccccatttctgtatagcaggcgtgtgtgtgtgtgtcgaggttttttattttttgcttaatcaaactccattcccaaatgcactccatctctggctctgagggcgctccctcctctcagccgggcagcctggcctctcctgcccagctgcggtcccagcatcccccggggccaggggncaggcccggcgggggggggttttatgttttgtttcaaacagaaaacacaaccttatttttctttacaaaagcaaaaaaggaaaccaaaaaagatacagcctttgaatgatg

SEQ ID NO: 287 - DNA, 931 bp, Homo sapiens
ggcttttttttcaatataacattttcttttgaaatagtttaagattgacaagcagttacaaagtggcccaggctatggcatacccttcactcagcttccccaattccatcgttaattttttgtatatgaaaaagtgaatggatcactttcattgtttccaaatcttctgaaaagcacagaaactaacacttgtgcagtacgcacaccaatggcctgcaaggtggctctgttgcaagactcttgatgaagcttggggaagacgtcatcaaactctggacttgaatgttaaacctgctggcagcctgccctctcacagtatggtcttcgtcatgggtgccaacaaaacttggccttgtttaaaaagaaaaatagctcagccaatctttgtgatgaaggttttgaatgcttaactgaattcaattaggacaggaaaaaggaattgcctttacatgtgcagaataaaaaaatctgtttttattttttttccaaagagctcacttttctcaaatgagaaaatgaagtttaatttagtataagaaagatcaattgtaataaagaaaacttaaaaggctttgtgtcaagacggattatattcaaaagcaatatttaggtgatgggttaagagaacagctggcacaattaaggcctgaatgtgcaccctgtggttgagaagaaaatgaagagcacttaatcatatggacgtcgtatatttttcaagacataaaacctctaatgttgcttttcccagaccaaggttggtgaaaaagcttggagactgttttattacattgggctttctgcccagttttaatcaccattagggaaatagggctctgaccaggatactatatttcactttcaggatggctagtggcaagtagcattgtatttcctaaattacagcctgaattatacgtatagcagaatgatg

SEQ ID NO: 288 - DNA, 1574 bp, Homo sapiens
attttttatttaatttcctattttcacataagttatatttaagggaggagggaattttttttaaacaagcttaggtcctttcccgagctgcattttctaagttgggtcatcgtgtcggctggttgtctgacgagcatcgttacaaacaccatgatgaggggtttggggttttattttgatgtcttttcttttggtcggaagtgagtgaaggagccaggtcgccctgaaggttttccaaagggcttggctccagagccacctggcagactgcccgtggccctgctgtcgggccccaggccgttgtcctgctctgaccacagagttttaatgtttggttttcacttcttttaaactggacaacaaatccagcatttcaagtgccagaagtataactttctaaggagagaagggttgtcacattataaaatctttaggaaaatgtgaactggaaaacgcttcggtcagttttagtgacatagcctgtgatgatgggtctggtgactattattgcggaccgtggtacccagttttaggaatgtggagaaaggaattctgttgattccgttgaggaatctgtagcgtatgcattcgttctgttaagagcaaatctaggagaagtgcttcagctgcccagtgcgccgtggggagtgttttaacggatcgtgtcgcaggagagcacagcccagcgttggggccgggaccgctggcgcccgacgtcggaagcatacaggtatactatgcaagtgtattctgccacaacaaccactgtcttttttacctttttttgaacaagaatatatccatcctgcctaaccctgagttttggagcaccacagttgtcctgggagttggttgcatcttgtagccatctgactcctgttttaaacggggtctgtcttgctaaacactacaggtaggtggtctttgaagtccactggtggggaatgtcaagacaagatacttatcccatgacatctgatgcatgtgcagcagtggggagttctcgattgatctctgaatgtgatcgacgccccgcaaggacaagcttaaaatgtctgcggtctgcccttttgacgcgggactcgctcactctgtcattgggagctgtcagctgcgactgcaggttctctaggaggcattccagaatagagtggcacactgtgtctgcagttctcgatgaccgaaagttatcaaaaatatttaaaatatttaaattgtgacctattgataaagaatatttataaaaactgatctgtaggcctgtactaatctctccgcattagcaatattgactgtacacccacattaaggaaaccactccgggtctggcagtgcgtgtcccgtggggtgtgcattttaaaactcgattcatagacacaggtcccatgttccatttccgtcatggtgaagcaaatgaattggcctggctaccactgtggtcgcgtgctacaggtttgacaaaaagatatcatgtttcgatttttttgtgtgtggacaacaatatggaagctaaaattgacatatttttatgtaaagtttttctattctttgatttttaataaactttggaaacc

SEQ ID NO: 289 - DNA, 1685 bp, Homo sapiens
cgacgagtgaaactccatctcaaaaatatatatatatatcaattaccaactaaaaacataactccagtttggcagtttgcatattataaggagataaatgttaaaacatacttgactactttcagaaatgttctcctggtactttttgcatttctacattcagataaaaagatttgcatgcacctggctaacgccaagggaacttcatttttttcttcactattatgcactttcatggtatagtctttctcagttcttttaatttttgttatttaacatctttaatagcacagcaaacatcttttcagaaattttcagttaaagcctttgaattacttatctttgatttaatttacagccagcattttgccacgttctaaataatatttagctcaactgattcatacgtattaatgaccattctagcaaaggcctacaagtggtgtgggaatcagggaaaggctgcctctttggtatctcaactggtattgattattgctatcaactatttggggagaaaaaatcaaaatgaagccctgtcaaattttagaagtactatctttggtccttcaaacactttgtgatgacaccttaagaaaaataaagttgaagttcaggtcttgccattgccattacagacaaattaggagacttggtttacctgggaacaaatttacttgaatattcagtacctgaaactatgccaaaccaaagagcagctgcagtacattcgttattttaaatgaacaagtttacaaagtttattttcatctatacgtaaggatgatttttttaaaactttttacatattagtggttatgatccaatgtgtcatgagtgaatttaactgtaaggtggtttaaatcaaatatgcaatgtttacttgaattgtatttctattagcagattttgactatgtttacaggacggtttaaattaaggattatcaggcatgtgagatctttcagttatctttaaagtagatgtatattaagggcttagatttaggatctacatattctgggcattgaataggcagtaacttacaaataagttttgcttaccttttgttctagggactagcactgctatcaatggaaagtatttttaactaatctgttattaagaaagtcatatttttgcatttcagccaaaataaagaccgcctgtaataatctgttagaaacagataatacatgtctgaaatccatgtttcatatgatctaaactgtattttccaatttaaattaaaaatgtaatgtagattcagaaaggttcatatttttctaatgacttcattctatattattttgttaggttgcataaagaagcaaggaattgtacttgtattaaaagatgaagaaagctattaggtatatttgtacatgactgcaaatgagtctatgcccgtttaaaagaaaagatggacactattttaaagtgagctttaatatgcttttatataaacaaatttgaagtacagtttagtttggttgtgtttacctaacaagtaccataagccttgtgtttgttcttatttgtataatcctagcctgtgacttaatgttgatgctttgctttgtcttttggctggcctaacctacattgacatgtacacagaacattttaaaactttttttttcaaaagtcataatgaattactttattaataaacaaagtcttgt

SEQ ID NO: 290 - DNA, 1545 bp, Homo sapiens
ctcatagaattctgtcactctgtgctgtggggaaggaaccagacatacacttcaaaacttgaaaagtgaaaggctatttttcttcattatgttattttatattttaatggccttttcttgctagtgtctttaggtcttaataatcagactactaaagcaaagttaaatatgcatgtagttttcaaattaacattcaaaggccaaggaaaataaatatatactatatatttgaggttatgataaatttaaaagttaagtctatgtggaaggaaaaatggaaattccaggaagataaaacagcagaggtactgtctgcctcattggacacctcttttacaaacactttgtgtagcttctatgggaacacattgttcatttttttttctcttctctgaatcttctattcactatccctttctgcattcctcaatgtctacactctctctactagagagtattgtcgatgtcagagtatatggtagacattttatgcatttatggctcttttatatttttacagtttttttaaactgtattcccactgtatttgcataattagggtaaaaaggatgtaatgagttagtagcaactcattacagcaactagcatgggtccttcttattgggcaactaaatagtgttacccaaatttaacagctgtccacatagaacacttaaacgggattgaatggctgagaaggggaggctagctatcaggctgtgtgttttcttttctccaaagctgccgattggtgactgaatgcagctttggaccatgccctgacactgcataaagggctctttggagccagctctactctaaacagcgtgctccgcttttgttttctccttcatctcaaacatatacctgtctcctctcccatgttacctaaggcaaagagagttgataggattatagtatcgttaaggcaacttaacttttctcaccattttaaataaaattactattaaaaatccacaggaagaaagtctatgaaatttgcagtttactttttaatcagatattaaatttcacttcattacttcacaatttaattttttcagtgtctctaaaagagagggattaaaagaggagaaaaaatgcaattgacattaatttagttttattggtttagcaggtttttttaattatgtattatttaaagattttatcaactattttaataactcactaaagatgtgcatacatatcttcatagttcatatgatgaaactgaggttaacagaaaatgtgatagatgttcaagttcagtagcttgatctgtttcctttctgctcttggttttgtttgtttgtttgtttgagagggagtctccctctgtcgcccaggctggagtgcagtcatgcgatctcggctcactgcaagctccgcctcccaggttcacgccattctcccgcctcagcctcccagctacttgggaggctgaggtaggagagtcgcttgtatttgagaggtcaaggttgcagtgagccatgatcatgccactacactcaagcctgggcatcagaaacagaccctatctct

SEQ ID NO: 291 - DNA, 1936 bp, Homo sapiens
  misc_feature 1505,1506,1508,1902: n=a,c,g, or t
ataaataatagcattgttaaagatagttattaccaaaaaaagagagttattacaaataaatatgtctctttatttttaaaaatgaaatcttaattcatttactctatttgatgataaactataaattcattgaaaatgtgaattctattatgggtagcctttttaccaattataaggaaaatttacagcagtgaacatgaacattcacttagcttcctcagtctctccatcttaaagatcatttatcagaggaggttcagcattttttgcagcataacttttcatgagtctgtattactaatggataagtcaaatccatcctgcacttctacagtttagaaagtatctggactcagaataaatgtaatatttatacttgtttccagaatgttattttacattttatgttcaataagaacactttttaaaagacgtatattcaacataaaatcagctatcagacttcagattagactttatttatgtgggtctataataattgtataaacaagaggaaaacactatatatgtataggcctggaaatcacagacgagtaaggacaaaacataagaaacagggcatcacatccacagataagtaaggcagagaaatactataaggataaacaaagtcaagtccataaagcaataatccctcagaaggaaagtccttacttttcacatattaatatttagtaatttttcctgcttctaaaagtgagagtatcacaccctaaatgaacactgtctactaagagacatcattccatttccacaaatgaagattttattccaagaaacgagtttactgattggagcatagggcttgttgttatttttattcaagcttttagtaatagccttgaatttattatttttcttataggctttttgttaaaatagtgaaggaacaaatgttaaagggtaagataatttccctgcaaaaggacacagaaggcagtcttaagaagatgaatggatgagagaagggagagaataaaatgcaataacgagccagcatttactatgtattttctcctcacctgtctctccatatttaggtcacttaccagtttctgtgcccttttggagcttttgttgagggcttcattctcaccctgtatttctttagccctaaattgacactctctccaaaaatccattccattgtctgtggaccaagatgttctatgtaattcagaagcagaactcttggctaaagggctagtgtggccttcagaaaccattcaattattttctccctacacctttgtcagtttgaaaccagtgaggaaaaaaggtatgttgataagaaacctatattgctaggtagaatttgtacttgttttcttggtagcagttttgaaatattctgtacagtacgttcctattgtttaataataaattcaaaaatatttctaaaaccttaaaaccaactatgccatgcattaagataaacaaatatgatgttctttgacgtaaatcaacgtgatgattctttcacnngnaaacacattttagtgtttctggtttgtcatttttgttgttgttgttgttgttgttatttactctataccctttagcaaaatacagttttaaatttttattgttttttgtagtttcccatctttaagacttttcttatttttctgagaaagaaagcctttttcatatatatatatattggatttctaaggttggtggtttgagccttgattagacttttgatgtgctaagccagacaggcagtctgtacattgatggccatcacaatgcagctttggtttaatttaattcgggcctgctgctgagttatgcacagactttttgttgaccaaaataaattttaaagggttttcttctgtttgacttttgtgttcattttttctctttatgtattanatttttacctttattaaataaatgtttaaatgat

SEQ ID NO: 292 - DNA, 1635 bp, Homo sapiens
  misc_feature 495: n=a,c,g, or t
ttattattaaagattctttcagtgtaaatctttttctaccattgtatttgcttcagcaaaatcattttgtggttgagtggggatgaaaagcataatgtacgaaggagtgagtcctaataggaagccgttctccaagtaaagaccacttgttcccttttgttcaggggtgcatgccagagcttcctctcctctgcaaacattgtctcgctttaccttccccagcaagcggttttcactctcccggatccatttgttcaatggagagtatattttaaaagcctgcccttagcttactggttcctgccttgtaacttcagcttactggttggaccagataatgttttaccaaaaggaaagggtgtgtgcttgcaacataattgcctgggggaaaggtagcagaagtcaccccgccactgtaccctggcagggccaccgtgggtgcattctgtgccagccttgcagccaccagagcggccagtggagggcgccagctgncagctgatgctctgatggcggtggcattttctgtctttgcctggtcactgtgccattttccccaggataacataaagattataaggaaccaatagtccagttaaataaaaatgagtttttcctgaaagtcctttaggttcttatataaaagcactcttctctgtcttgggtttggcacatctccattcttaaattccactgaattagcagcttcctaaatatgtcacgtttcttatcacaagcctacatacgttgttttttctgcacaaagcaaataagaacaatcgcttgattatttgaagagaaaaagttaagttgacctcaggcagctgaaagtggcatcttctgtaggaaccccgattaaccatcagggggcgctcagactttgttaaattactggtaggcctttaaaacctaaaattagtgtttacagagatttgttggcatagtcattgggattttttctttctggattattttttgccttctgtttttcagaaacatatgtctgttttgaggaacgttcaagctgaaattgctcctttagaaattgtaatactgatttccactagcagtcaaaaattattacaaattttagaatttggagtctaaagactatgtcttataataaattagctattttcagccttctaataagactccagaactggaaggatacttcctgctgccgggagccattcctccttatcctggacatcatagacagtgctcctggcaggaccctctgagtctcattgccacactcaattggtgaggcctcagagtcacaataacttgggtatatttgttaatgggccatggctattttttctttttttaaaaaaatgatatgacaggccaggcgcagtggctcatgcctgtaatcccagcactttgggaggccgaggtaggcagatcacttgaggtcaggagttcaagaccagcctggccaacatggtgaatatccctatctttactaaaaatacaaaaaaaattagccaggtgtggtggtgtgcgcctgtggtcccagctacttgggaggatgaggcaggagaatcgcataaacctgggaggcagaacttgcagtgagctgaaattgcaccaatgcactcatctgggcaatggagcaagactctgttt

SEQ ID NO: 293 - DNA, 1011 bp, Homo sapiens
ctatagtagattagatcatatgatgattctaaatcgatgtttcactttctagctggtgccgacaagaaagccgaggctggggctgggtcagcaaccgaattccagtttgtgagtatcttcctatttgttttccatgagccatcacttgttctggcctcagtctggttgctctgcaagttgtggggatgtcatatagtatgggtgggtcctgtcaaccagttccctcctcccacttttttccaaattccaaattttacattgagttgtagcatgcaaacttttgtaaatacataaattactgaaatgagtctcagaaatcagtacatgtggcctactagtattttctgtttcattaatgcttgacattgaactaaacactggaaggtgggtgggcttaagaaccaagatggtatgaaatcaaatcctccatcttttttcagttgatgtaatgttaggtaggttcccctctgcctcagtttctccatctataaaataaggtgataattacagctactaaggtagttgtgagattagttaatccaggcatagtactggcatatcatttttgtcctatggcaggtcctcatagcacacgattgctctcagataatgtcatttgtaaaaaggaagcatgtacagtagaaacggtccaatcctggtgctggatgctttcataggagtatgtatgaacacactctgggtgggtggccatactcccactttaccaatgaagaaatgggcctagatgttagatatggccccacatccagtaaggggcagtgctgggatttatagcctgtactcagctctctcccagctgtttacatttgggggcctctggagttataatgaggcctgaaagttagcaaaacctccaaagatcaaaccagagtgccgctcatgctgatgtgatgtgctttctcttacagagaggcggatttggtcgtggacgtggtcagccacctcagtaaaattggagaggattcttttgcattgaataaacttacagcc

SEQ ID NO: 294 - DNA, 1175 bp, Homo sapiens
  misc_feature 1130: n=a,c,g, or t
catgaaccaaggcagtggaaccaaacttccactcattatattcttgttttgttttgtttttgagacagtctcgctctgtcgcccagggtggagtgcagtggcgcgatctcactcgctgcagcctccacctcccaggttcaggcgattctcatgcctcagtctcctgggtagctgggattgcaggtacctgccactacccccggctgatttttgtatttttggtggagacggggtttcactgtgttggccaggctggtcttgaacccctgacctcaggtgatccgcctgcctccgcctcccaaagtgctgggattataggtcagatccaccgtaccctgccattttgttttatttgaagagactctcactctgttacccagcctggagcgcagtggcacagtcatgctcactgcagcctcgacctcccaggctcaagcaatccttctacctcagcctcccaagtagctgggactgcagatgcacactaccatgtgcccagctaattttttgtagagacgctgtcttaccgtgttgcccaggctgttcttgaactcctcagctcaaagcagtccacctgccttggcctcccagagtgctgggatcacaggcatctcattgtattttttactgccatctactcacagttaaaaaaaaaatgctagtttcacttgagtgtccttaatgaagcagcaaaaattattattagctttattaaatctttattaaatctcagttcttaaacacatgctttttaatctgtgtgatgaaatggaatatatgcataaagtttgctgcaaaatgaagactgatgattgtcttgaggaaaaacacttatgcaatggcttgtgtgccaaattagccacttattcatattactctttttttgcttgaaagaatgactgatagacaagccgtgattattcagatttgcatatttgcagaccttttctcaaaaatgaacaaggctatcttgtcgcttaaaggaagctggtagtatttgttgcaaatgataacatgacttgttggcaagtgaaaattagaaatttggaaaatttgctggtgcagtagctcacacctgtgatcccatcactttgggaggccaaggcaggaggattgcttgagcccatganttcaagactggcctgggcaacatggcgagaccctgtctctatatt

SEQ ID NO: 295 - DNA, 1576 bp, Homo sapiens
ctactgacctcaggtgatccgcccactttggcctcccgaaagtgctgggattacagtcatgagccaccatgcccagcctatttatttctgattctttaagggtgactggacgtgttgatcagcgctcgctgggatttggctgacgtggccccagccccgcctccctccccaccccacaatggcagaagaaactggacagagtaaattagctgcagccaagaaaaagttcaaagaatattggcagagaaaccgccctggtgttccagcagcagcgaagaggaacacgaaagcaaatggcagtagccctgagacggccgcttctggtggttgccactcatctgaggctgtgagtcttgcctggacaggcttttggggacagggggcccaaggagcagtagagggcaatcgttaagattgtggatggactgttgggtactggtgaaggattctggatttggccgggcacagtggctcacgcctgtaatccccacacttcgggagaccgaggcaggtggatctcctaacctggtgatccgcccgcctcggcctcccaaagtattgggattacccgcgtgagccaccgcgcccggctgcaaataatctttctttttttctgagacagagtctcgctctgttgcccaggctggagtgcagtgcacgatctcggctcacggcacgctccgcctcccgggttcacgccattctcctgcctcagcttcccgagtagctgggactacaggggccgccaccacgcccggctaactttttgtgtttttagtagagacggggtttcaccgtgttagccaggatggtctcgatctcctgaccttgtgatctgcccgcctcggcctcccaaagtgctgggattacaggcgtgagcaccgcgcccggcggcgaaacacgatattgtactaacatcttaattttgttataaaatctcacaaaccccctgacatagtctcagagatctgtagggccgaggttacatttggagaacccgtactctagggccaaatccattcttcttgccctggctcacttgtcccccccaccgccccgcgctggagccactgcctagttcttcagccctagatggtgctcgccagacctcctctcaatgctcatcacacacagggctattcctttcctccaatgaaccaaacgcctcccgcccacctccaggtcccagtcctctgttccctttgcctggtccacccttgccctccctgggtggcagacgaggtcggcctcgtcattccccgcagaccgccgcgcgtccctcttgtgcggttcaccacagttgtatttaagtgatcgtgtgagtcgtcgttaaatgcctgtctccccgcggatcatgggctcctcgaggacagggactggcctgtctgtccactgctgtaaccccgcgccggcatagggacctaaggcccactggagggcgctcatcaagtagctgctggatgttgacgaaggaagcggcggcgcagctcagggatctccgagtcaggacggtcggccagacccacggggtaacgggtctaatcgtgtaggaataaagctgtattccagtgcttcc

SEQ ID NO: 296 - DNA, 1151 bp, Homo sapiens
aactcaccgtacagagcccactggggggccatgctgctcaaaccacataatgcacactataatactgaatttctcctatgggtgatatggatgactaacaccaccttctcttttgatcctttcagtttcactttgaaaaatcttcacgtacataaaatttgccataatagtacagtgacaactcatgtacacttaccttgattcatcagttgttgacagtttaccatactagctttatatatttctcgaaaaatgtcattttttcctttatttctcccttgttgccttcctccttcccccctcccttcctttcttctttccttccttccttctttacctatttctttctctcatttttttctatttatcctatcttatttttagaaccacttacaaagtagtttcagaagcttaccaaactcattaactaacatactttaacgtgtatttcacctaagaacaaacatttcagatcactgatcagacagttcaatgatgacctcagcatatttaccaatttttactaattgtttcattaatgtagctccctcccctcacatattacatttatccatttctctttagtatactttaatttagaattgtttaccagctgttttgtgtctttcatggcattgatatttttaaaaagtccaggttagttgttttgcagaatatgcttcaattcagatttttctgtttatctattcttaaaacaccgcatgttctcacttatgagtgggaactgaacaatgagaactcattgacacaggaaggggaacaacacacatttaggcctggttgtggggggacttgggggagggagagcatcaggaaaaatagctaatgcatgctgggcttaatacctagatgatgggttgataggtgcagcaaaccaccatggcacgtgtttacccgtgtaacaaacctgcacatcctgcacatggacccgggaacttaaaataaaataaaccaataaaatcctaaaaaaagtacgacagtaggccaggcgtggtggctcaagcctgtcatcccagctacttgggaggctgaggcaagagaatggtgtgaacccaggaggcggagcttgcagtgagccgagatagcaccactgcgactccagcccaggcgacagagcgagactccgtctg

SEQ ID NO: 297 - DNA, 1020 bp, Homo sapiens
ccgctttttttttttaactcctttttagtgtctgacatgggcctggcatccaggaggcaatgggaatacgaagatgaatgaggcctgggctcgtgcagtgaaggtgaccctctggatggtcctgaaggcttttgaatgatgtaaaattttgagtgactttttgagacgggagtaattgtataaacacaagtttggccagttgattctaatgttttctactgcttaaaatatggaggtaaattataaggctatagcgaattgtgtttatagggattggaaatggcctatacatgtcagctctgtgttaaaaatgcttgtcttttgtcaacgaaaaccttacgtactacttctcccacttctccctttttatgttggtagctgggaatgaaatccagcaatctctgaacccgctgattggaatttgtgccctgatcacattctgaggctgcttgaggggggattttcctgagagcctaatgactctgtcacttaccgtgattgattttggctccacatctgtccctcctgccacactgaatcccagacctgagccttcttttctattcaagactatgaagcaaacatcttcttcattctagtgaaaacaaacaaaaattatcctttgagctacagctgcaaaaaattaagaaagaaaaacatatccccttgggccaggagtaaggaagctctgatgtcagtcctcttggaggggcttttcaccacaggccctaaaggttctttggctctcagccaggcatggtggctcacgcctgtaatcccaacactctgggaagccaggggggcggatctcttgagcccaggagttcgagtccggcctgggcaatgtggcagagccctgtctctacaaaaatcagccaggtgtggtgttgcacacttgtggtcccagctactcgggaggctgaggtgggaggattacctgggcccggaaggtcacggctgcagtgagccatgatcacgccactgcacttcagcctggttgacagagtgagaccttgtccc

SEQ ID NO: 298 - DNA, 1849 bp, Homo sapiens
  misc_feature 1677,1813: n=a,c,g, or t
tttttttttttgagataaagtcttgctgtgtcacccaggctgaagtgcagtgacatgatcttggctcactgcaacctccgcctcctgggttcaagcgattctcctgtctctgcctcctgagtagttgggaccacaggtgcccgccaccaagcccagctgatttttgtatttttagtagagatgggttttgccacgttgcatgccaccaatttgaagggggcctattcatgttatatgatttatcatatgtctggggttcaggcaatttggtcattctgttacaattgcttaaaaatgttcatgtgcctttttcttttcatttcttctgcctttcaatccacatcaagtttccttctcataaaatatttcttgttatgtctctagggtcctgacctttgtcttcacgagtaacatctgctttcactaagttgatctgcaagacacatctaatcttggctttgctcaatttctgagttggttagatttcaaaagttttgaaatgttttctgggattttgcatgcattttttcatagggtgaccaacttttcagactagtttctcaaagcctatttcacttattcatgtagtgggattaggaccagcttgagtgctatgttcaggaactatgaggaggtcacagccatcaaaggaggaggagtgttttctcccaccatgaccctgaatgcaggttcatttctaggtaaaagttttagataagtaggttacatcttccttttcttccctgttccctgtactccctttcataactccctggggctttccctccaactcttcggtgctcaagtgtccccacacagcacttacccatttattgtatgcctgcatccagaaacaatttaactctaaaactgtgtttcaaaattacttgcatcactgcttcctcattcgctgtgtgtggttgctctacaatctttgggaaagcgaaagtggaattaattgaccctactggataactgactgatttcattatttaaactaaaattctcagatataccaaatgaaataattggcaaagtgaagtgaaagtattcaggcaggttaaggagtatattttggaacagcaagacgtgaagtcatttattaatttaaagaacatttattgggcggctttcatgaactaagctctttgttaagcagaggagatgaatgacactggattacatgggctaaagagaaagaaaagccagcaattcaatagagtatgttaagtactattgtaattcctgcactttgggatgccgaggtaggtggatcatttgaggtcaggagttcgagaccagcctggccaacatgatgaaacctcatctctactaacaatacaaaaaattggccaggtgtggtggtaggtacctgtaatcccagctactcaggaggccgaggcaggagaatcactttaacccaggaggcggagcttgcaatgagccgagatcatgtcattgtactccagcctgggcgacagagtgacactccatttcaaaaaaaaaaaaaaaaagattatacaatgcggcatttgggggatcaggcttcccaggggaagtgacagcacaaatgagatgtggaggcgtgagtcatggctatttttgtgtatggtgcttataaatgctctttctaccttatgacttgtcgcctctgttggtgcagaggttcactcacgngagtacactaagcaattgcttaggctatttgtttggaactgtatcttgctcgagtgcgccgcgttcccagtgttctgattcccctggtttcgagtcgtcttctgggaactgtcacatttcttagagccgacccacngggcatttgggtgaccagctgtgtgctgcttggata

SEQ ID NO: 299 - DNA, 1037 bp, Homo sapiens
tccatcttcactgatgtcagctgttctttcaaactaactgaaagatgttgcattattcatgtttaacaaatgggttaaaaactccactgaaactctttctttaaaggactttttctcaagttttacaagttcacacattgattgtgtgtgtgtgtgtgtgtgtgtggtataacacctttaacagtggttttgacagcaaaatcataccacaatggaaacatatccaaatatccattttcaaaatgctttttttgcagcacaagttttctagcagttgctttcacactcattgttgaaatgctctttggccttgaagggatagatgaaatatgttcatacaaaaatatctgccagataggcgtgccacttcagccccttgtgatgacaacaacaaaaaaggtcagcatatttggaagactaacattttgtaaaagaaaaacgtgtttttaagttatctttaagttattcaggtctttcaaaacataagaaaccgcttgtgttttaacaaagatacttagtaacgactccttagaactcctggtcaccacacagggacatcagacaagtcctggcgccattgttactccatgcattaaatatgacaaaacttactatctttgtcttcctcaggttatatgcataggttttgatattttctctctgtgccccatggatgatgtgtgccccatacttcagataccaaggtctctaccagtgtagaccacttgggggggcattagaaaaccttggccaggccaaccacagtggctcacacctgtaatcccagcactttgagagaccaaggtagaaggatggcttgagcatgggaattcacgaccagcctgggaatctagggagatcttgtctcaacaaaaaaattcagaaattagtcagccatggtggcgcatgcttgtagtcccagctacttgaaaggctaagatgggaacatcacctgaaccctggagatcaaggctgtagtgagctatgatcgtgccctgtactcacttcagcctggcaaaagagtaagaccctgtctc

SEQ ID NO: 300 - DNA, 1424 bp, Homo sapiens
gcagaaaataaacaaatcactactgctgaaatcaggcccataagaacaccaaagatcctggctcataaaagacgttttaccagtccttcaaccaaccaggaggaatccagttttcaaacaaactaatcagcattcttgactgatcaagtggcataagccactgccttgggtaaaaaggcaagttgctttcttagtaaggaagtcccatatggtggccatttcagtattcctttacctacactttgggctttccttatccatgattctggccatctctggtgtccccaggtgtccacatcccccctataggattaacagataatgctgagtaccattctctctacattgccaacaaaagatttcagctttggtaaacttaatatgaggtgggggaggaagcgaacagtcaatgtgcagagtactacaaagaatatcaaaacttgagaactttaagggatctatcacatctcatctccaaacactttgacagacaggggaacttcaaaccagaaagggcacaaggtcatatggagtcattgacaaaaccactgctagagtccaggcttccatgattcccagtccagggctcttatcattaaataacacagcctcccttctttcctgggaggaactgcaggcatgccatccccctgccaagataatcaccctccaagagcccctcctcctatcccagtccctcctacagcacagctgagttgcagctcaaattagcaagtcccggagcagggggcatttctgggagggtgcccagtctgagggttgctggtaccgaagaggagggacaaagatggagaagaaggtgacatcccacaaagggtttgggagaactgggtccttggggcagtggcagtgagcctgctgggctggataaagacacatgcagtggcatctcccaaagcgcattggggaagcagaccagcagttggcaccacctctagcagcaaaaggaagggctgagccttgatgggcagggaagcctggggcatctccgagtccaagttgggcctcaggggtgcctcctggcagagtggcactggcgcgcccgtgaggtggcaccagtgcccgggaggaggcccgaggacacagatgctcctgcctgcccgtgggatagcaccggcacccggcgaaggcccagcccccccgggaggtggcaccggcgcccggcgaacgcccgacgaccaggatgcccaacccgcccgtgaggtggcaccgacgcccagtgaaggccagacgaccaggatgcccagcccgcccgtgaggtggcacaagcgcccggcaaaggcccgacgaccaggatgcccagcccgctcgtggagtggcacccgcggctggcggagccccagcccgctcgtgaagtggcaccggcgcccggcggaggcccgcggtcctcaccagccggatca

SEQ ID NO: 301 - DNA, 2565 bp, Homo sapiens
  misc_feature 1344: n=a,c,g, or t
ttcctccaggacaagaaccctgtcttggttccaaactttcccaattataagagtcacctttgcgcttgttaaacctgcttccaggtgcttctcctgaggtttcctgattcagctagactggaggtgggacctgacgaggtggttggtttttagtgttctcaggagtgtggatgttttaataggtgttgggtcctcatgttaatcgacctgtgggtgtgtcacagtctttgtgtcacagatgtcctgagaaaggaaacaatttgaggatgagtggaggggaatttgtggtgtagagaaggccacagttaatatgtggggtgaatttctgaagacctctcagttcaaaacttgaataactcaagactcatcctgacaaaagccagtggatgtttcttttgccaaataaaatatacccttggtgcaactggaaaatcttagcttataattaacttgacagcctttgaaattaagccattcttgataaatcttgggggaattaacaactttgtgcttaaaatgaattttactaatttttatgatgttgaaattcaaatttacacccaattaaaagatataaaatgcggtatacatgattttttttttccactagaaaataaagattcccagtttagtcatctttttctgatcaccagacaagaggtcagggaaagataactgagaatccaaaatttccgttgaaagtaaagaaatcatatatagcacattctctggtaggaaaggttactcagtaagtgagacggccgaggtggtctattttctatacagttgggccataagagaatttatccaatttcctcctagcttagggtcctgaagtcaggagttccttttttcttaaggattagggaccatgtttttcagggccttttgaagttgttaaagcattgtcaactggctcaactacacaaatgccatcatttattatccactgaccaaaagattaacttccaaatcctcatcctgacactaaaggccacctattatctagccaaaacttaccttcttcacttgttctccccagtcctccagcttagcctaaatgttctactgtcatgtaaagcattttaactttgtcttctgtgcttttgttacattgttctgagttttagtactcagtcctctggactacttgaagctttttatcagtctgtcagttcttttaaactcttgctcaaatctcactctgagaagctttttcatctcattgtagttcacagggaagtctttctcttaaggcctcattccttgcataacgaataattgtgtagctttttaaactgtaggcttattcctcaatttctttaccttgttttacattttctngtctgacttctgctagagacatatgcttctcggtatttattccacaaaggctatcccaatgcctactataaaatagcttctcaatgaaagtttgttgactggttgccagtcaacagaacactagaaaattgatctgagagtggtgggttctagtaaatactctagtaaatatttttctctactttttttctaactttttttcttactcctttactatggatactcttttaattattgcccttcataattattggcccagttgaaacaactgttatagattcaaaaatcctcagagtggtaaagtactacacttggcatcttcccttgagccgatgtatctatgtagctaaaatgatgagattagagtggagctttctcaccctggtttgaggtgctgcagaaatggtctgcttttctagtgccttgaaaaaggatgagaagagaggtgcattccagaagacaaaaggtgtgtagtatcaggataaggggctttaaatatcagatccagagaacactgcacatgtagaaatgggcttggcctgggtcagggcattgagattggttacataatcttttcaaggattggtgaatgagttggagtatgtgtagaaacctacaaagatgacagtttaatctcatgtcataatttttagacaaataatgtattttaaaactgggtgcagttcctaaagctgttctaaaagtcaatgcaactgaatttggaatgtaagcataggacaacagatgggaaataagtacatgacctctgtgggataaagtgagagttaccaaagaatgtcagtgtttaactaggaacaagcttgttttggagaattactagatattatggaaaatttttttcttttctacatttgattaactatagctgaactatagcagatcatatgacttggcaaaaatagaaaacttgataaaaatcttctaggccccacaatgtcaacatgaacaaacttttgaaaagtaaaagtagaccgtgttttctcagtatgtattatcaaatatatgttgaacataaaatttttgcccctcagccaggttgtaatattttcctttagtttatctctttaataattttttatgttaatccattttattttgaaaaaataatgagctagaggatccaaagatgtaaatgaatctaaaagagagaattaaactggcataaagataaatataattcaagcaagatatgttattccc

SEQ ID NO: 302 - DNA, 1643 bp, Homo sapiens
  misc_feature 871,907,933,958,1124: n=a,c,g, or t
cccagccctgagattcccaggtgtttccattcaggggtcagcactgaacacagaggactcaccatggagttgggactgagctggattttccttttggctattttaaaaggtatccactgtgaagtgcagctggcgcaatctgggggaggcttggtgcggcctggcaggtccctcagactctcttgtgcagcctctgggttcagtttttctgatcatgcgttcagctgggtccgtcaagttccagggaagggcctggaatgggtctctggtataagtcggacggggacaaccgtcgcctacgcggactctgtgaggggccgattcctcatttccagagacaacgccaagaactccctgtatctgcaaatgaacagtctgagcgcggaggacacggccatctattactgtacaaaagatcttccaggattaaactacggtctggacgcatggggccgagggacctcggtcaccgtctcctcagcctccaccaagggcccatcggtcttccccctggcaccctcctccaagagcacctctgggggcacagcggccctgggctgcctggtcaaggactacttccccgaaccggtgacggtgtcgtggaactcaggcgccctgaccagcggcgtgcacaccttcccggctgtcctacagtcctcaggactctactccctcagcagcgtggtgaccgtgccctccagcagcttgggcacccagacctacatctgcaacgtgaataacaagcccagcaacaccaaggtggacaagagagttgagcccaaattttgtgacaaaactcacacatgcccaccgtgcccagcacctgaactccttggggggaccgtcagtcttcctcttccccccaaaaccnaaggacaccctcatgatctcccggacccctgaggtnacatgcgtggtggtggacgtgagccncgaagaccctgaggtcaagttcaantggtacgtggacggcgtggaggtgcataatgccaagacaaagccgcgggaggagcagtacaacaagccgtaccgtgtggtcagcgtcctcatcgtcctgcaccaggactggctgaatggaaaggagtacaagtgcaaggtctccaacaaagccctcccggcccccntcgagaaaaccatctccaaagccaaagggcagccccgagaaccacaggtgtacaccctgcccccatcccgggaggagatgaccaagaaccaggtcagcctgacctgcctggtcaaaggcttttatcccagcgaaatcgccgtggagtgggagagcaatgggcacccggggaacaactacaagaccacgcctcccgtgctggactccgacggctccttcttcctctatagcaagctcaccgtggacaagagcaggtggcagcaggggaacgtcttctcatgctccgtgatgcatgaggctctgcacacccactacacgcagaagagcctctccctgtccccgggtaaatgagtgcgacggccggcaagcccccgctccccgggctctcgcggtcgcccggggatgcttggcccgtcccccgtctccatacttcccaggcccccagcatggaaataaaccccccccccctcccctgggaaaaaaaaaaaaaaaaaaaaaaaaaaaaaaaaaaaaaaaaaat

SEQ ID NO: 303 - DNA, 1634 bp, Homo sapiens
cttagccctggattccaaggcctatccacttggtgatcagcactgagcaccgaggattcaccatgaaactggggctccactgggttttccttgttgctattttagaaggtgtccagtgtgaggtgcagatggtggagtctgggggaggcctggtcaagccgggggggtccctgagactctcctgtgcaggctctggattcatcttcagtgactatggcatgagttgggtccgccggactccagggaagggactggagttgggtctcttccattagtatgactggtccgttacatatataacgcagactcagtgaagggccgattcaccatccccagagacaacgccaagagttcactgtctctgcaaatgaaaagcctgagagccgcggactcggctgtatattactgcgcgaaattcagtctcttagttccaactactgtcgatcaaaacccattcttctactactggcctatggacgtctggggccaagggaccacggtcatcgtctcctcagcctccaccaagggcccatcggtcttccccctggcaccctcctccaagagcacctctgggggcacagcggccctgggctgcctggtcaaggactacttccccgaaccggtgacggtgtcgtggaactcaggcgccctgaccagcggcgtgcacaccttcccggctgtcctacagtcctcaggactctactccctcagcagcgtggtgaccgtgccctccagcagcttgggcacccagacctacatcagcaacgtgaatcacaagcccagcaacaccaaggtggacaagagagttgagcccaaatcttgtgacaaaactcacacatgcccaccgtgcccagcacctgaactcctgggggggaccgtcagtcttcctcttccccccaaaacccaaggacaccctcatgatctcccggacccctgaggtcacatgcgtggtggtggacgtgagccacgaagaccctgaggtcaagttcaactggtacgtggacggcgtggaggtgcataatgccaagacaaagccgcgggaggagcagtacaacagcacgtaccgtgtggtcagcgtcctcaccgtcctgcaccaggactggctgaatggcaaggagtacaagtgcaaggtctccaacaaagccctcccagcccccatcgagaaaaccatctccaaagccaaagggcagccccgagaaccacaggtgtacaccctgcccccatcccgggaggagatgaccaagaaccaggtcagcctgacctgcctggtcaaaggcttctatcccagcgacatcgccgtggagtgggagagcaatgggcagccggagaacaactacaagaccacgcctcccgtgctggactccgacggctccttcttcctctatagcaagctcaccgtggacaagagcaggtggcagcaggggaacgtcttctcatgctccgtgatgcatgaggctctgcacaaccactacacgcagaagagcctctccctgtccccgggtaaatgagtgcgacggccggcaagcccccgctccccgggctctcgcggtcgcacgaggatgcttggcacgtaccccgtctacatacttcccaggcacccagcatggaaataaagcacccaccactgccctggg

SEQ ID NO: 304 - DNA, 1241 bp, Homo sapiens
tgaagtctcactatattgcccaggctggactgaaactcctgggctcaagtgatcatctcaccttggcctcccaaagtgctgagattacaggcatgtaccactgtgcccagccttcatgtcaatttaaaattgcaaatctccctggaggttgtggtcaaaccctcttggggagaccaactgaacatttgcagaggatacacaaactactccgttaatgcagagttgtgttggtctactctcagtgtatagtctcccctctataaatggcactgtcccaggggaaaagccgaaagtgctaagggtaatatattctaacttctttaacatccttatccggctttctacttttcataagttttggtaattggatctttttcatcttcttttaatgttgttactcaggatttcagacatgagactgtaaagcagaaatgaagataactatagtgaacatttttaactagagtttaatgtaagcatgataaaatggaaaagatttaagttttcttagactgtctctaccaccacttgctgtatgaccttgagcatattacaaacctcttgagcctcagttttatcatctctaaaatggattaaatgaaatcagccaagctttaacccattttagagaccatagtgttacatttcctctctgttagcagtatcataactcaggactggctcattttcatttcaggaccattgtagcactggtatacaatgtgctgaaaaccctaatggaaatgaatggcaagcttttcgatgaccttactagctcatacaaagctgaaagacagaggtatttgatattttgaattacaaaattatctatacattttatgttagttgaatgtgattcagttcaggaaggtatcttctctcagttcagattttcatatttaagaagttaattaccttatagtaaacattacaatgtgaaagtctcttaacatataagtcatttccagataaactagccccagtatttttataaatttgttaaagcagaaaaagcagtagcatttatttttgagggtagttacataatttacttcctctaaatggttagattatgattttaatgtggatcataaatcctgtttatctcattctgagccttagatttcctcagtctgttagcatctgcatatgaaatataatttatgctgaattttaaatatcaatttgtacaatttgattttttatccatgcatttacgaaaatcctttgaaccttagaaa

SEQ ID NO: 305 - DNA, 1501 bp, Homo sapiens
atttcattctttcttatagattccagttctttgatgaaagtctctattccacccatcaagtctgtgtctgataacaccaatatctgggtcattagtggctccgttttgttgtgtctgttttcccctccttcctgttttgtggtgtgtttgatcacttattgttgaatgctaaccattataataaattttagtggctccaggaaacattatctgaaaacaatgtctgtctcaagggagggtttaccatgtcatctgatagacagagtgggaagattttaccttaatccaatggtactgaactgactagagtctatgttgcagtttttggaaggcttcatctccatctctggtttgcccatctatctagagtgtggtcctccaaggattccagctgagcgtctgatgtgattattaggcttcttttccttggtgggtcctgaactccaacttttatctcattaatatgacactgccaaaacctgctgcctttcatagcctttctgcatagcttaattcagcagatgcctcaaggggaaagtgttccttttctgtgtctcccttctacatgatatctcggccccttcagttccagctgccttgacaacctcagtctccatttcttgtctctccagctgaagactctgctgactttgctgcctcttagctatggccgtctgcccaaatgctcggcctcttagctaaaatcagcacgtttcctgaaaggaaaagtagttcacagagggccagcttgcctccttgtgtttttcttcttttgagattatggcccttcaaatgtttgttaactgggaagctttcaaaaaacttttttaaaaaagttttctgtgttttattcagcctttccagttgttcttggaatgagtgttggtctgcctcaagcagaaaaaaaaatctcagaattcttttctcagaaaaaggattctcagcagagagtgattttatacacggaatgggattaaacaattcttgggaaagctggtgaagccaacgagggaacagttacttttatcagtgtgcaatttttttgctataatggtgcataacaactaatcacaacatgtcaatgccatacttaaataagcactcatttctaacacatctgtgggttggctggaggtggtctgagctagggtaggcaacaagagcaaaactctgtctcaaaaagaaaaaaattccctgtttattctttttttataatcgttttattgagatataattcacatatatgattcatccatttaaaatgtataattcgatggttattggaatatttacatttctgtttaattccctcaattaatttttaaatcaacttgtcaactcgtataggccatccctcagggactttgtttattgttgaattaactctgtatagtacatcttcccaaacagcaggagcacagtagagtgttccactaattcttgtctccttttatttccctcatgatatttaaatcatttcctttcaataaattaagctctc

SEQ ID NO: 306 - DNA, 1803 bp, Homo sapiens
gccaatctttttttttcctttaaagaaccttatgaaaacttgaaaggaaatgcagtaaaggaaaaccatggaaatggaactggaagtcaaagacatgatttttaagtcctggttctcttacttacttgctatgcgaactctgggcctcattatactactcatattggtagtgggccccaggaaaaccaccttgctggacctggccctccaggcctttgcaaactgccttggtataagggtttcttcccttgaccatcagattgttccctaaattagaacttaaaagccctcagttacacatgacatgatgcaattttgttaaaatgtagttaatcagagatgtaaaaagtacaattagtttttagtgatatgatttgaaaggactagggtaggttatataaaggatacgaggctgggagtggtggctcacacctgtaatcctaccactttgggaggccacggcgggtggatcgcttgagctcaggagttcgagaccagcctgggcaacatagtgaaactctatctctacaaaaatacaaaaactggccgggtgtggtggcttacgcctgtactccctgctaccctggggggctgagacaggaggatcccttgagcccaggaggtggaggttgcagtgagccaagtcacatcattgcgctccagctgggtgaccttgagaccttgtcacaaaaaaaaaaaaaaaaaggatacgaaaagctacaactatacctacaaagccctatacagagagaagccctttgtccctctctctacagctgcctgacaagccattcagtcaacatgtgccctagctgttacacaggctggaacatgctatccctccactaagcagaagagacagccctagccctcgctctcagagaagaagataatgcccacttcctcctctctgccctcagtgtatgtgtgccaggccctgcctagagacatgagggctataaccctagctacccctttactgatggtctgccccttgctaaagattatcagaaggcagcctgaaaagttggcttttgtttactcatctgataagtctatgttctttgcataagggctcattgggttagaaaaaaagaatgcactttgagatcctccattaggatagaaaattggtctttagtatattaaaatagtactacacttaccaaccaatgttgtagtaagaggatgaagtaaaataacagatatgaaagcattttgtaaactccaaagtgatttacaaacataaaaggagtagacaggaagaacaagttcaagatatctatagtacatcatgattgctaaagttaataacaatgtatcatatattgcaaattgctgagagcagattctcaccacaaaagaaatgataatgatgtgagaggatgcatatgtttgtctgatttagccattccacaaggtatacatttatcaaaatatcgtattgtataccataaatatatacaattttgtcaatcaaaaatatatcaatataataaaaataaaaggagaattgtatataaatgattataagcaactgaacttcaataaaaatctgtttttctgtacatggaagtcttcttcgtggaagactccatattataaagatgtcaattatccccaacctatctatagattcaatgcaatcctgtttaaaatcctagcaggtgttggccgggcgttgtggctcatgcctgtaatcccagcactctgggaggccgaggcgggtggatcacgaggtcaggagatcgagaccatcctggctaacacagtgaaaccccgtctctcatacaaatttagaaa

SEQ ID NO: 307 - DNA, 1539 bp, Homo sapiens
caactagtctttatattctgaaatgggttgatgaattataatatttgtacaaggagttgtgtgctttctgttctagccctcaacttggattttgtgtggtatgtgataatatgctttaatagtcatgaattttaataaagtaccaggtatagtgaaataaataataatttgaaacatggattctgttaactttattatccatgcctatattctttatttaccaggcataatttactagctttggtttttgttttgtttttgatagcccatatgctatttgctttattatacctttttaaaagtaagtcagagtttaggtttctcatgattaaattttagtattagaacagaatcttttaatgctagaaaccaagtgtataagtgcatatttgttctttttttttttttttttttttgagacagggtcttgctctgtcgcccagggctggagtgcagtggtgcgatcatgatcttgtctcactgcaacttctgcctgctgagttcaagtgattcttgtgcctcagcctcctgagtagctgggattacaggtgcccgccactaagcctgactggtttttgtgtttttaatagagatgggatttcaccattttggtcaggctggtcttgaactcctgacctcgagtgatctgctcgcctgggcctcccaaactgctgggattacaggcttgagccaccgcccctgactccaaatgaatatttgttctaatcttgctatggcgaatgcagttggtattgaggtcttgtatagacctgggttttaggatgtagcagaactggattaatatcctgcatcaccatttattaacagcattgctaatacaagctatgtttcctttctgagccttgtttttctcatcttaaaaaacagtaatagattaatttgcgcattctagaattttatgcaaatggaataacattttttgtgtgcattctttcagcataattatcttgagattcacacgtattgtatgtatcaatagttcatgcacatttttaggtttagtcgtattcccttgcatggatatacaagtttgtttatccattcactcttgataaacattccaaaaataatgggcataaggaaatttctgaggtgatgaatacattcagtatgttgattatgtgattatttcaagggggtataaacacacacacacacacacacacacacacgaaaatttatcaaatgtgcctttaaattattgtatgttgattctacttctaaaaagttgtttagggctgggtgaggtcgctcacgcctgtaatcctagcactctgagaggccgaggcgggtggatcacctgaggtcaggagtccaagacgggcctggccgccgtgacgaaaccctgtctgtactaaaaatacaaaaattagctgggcatggtggtgcatgtctgtggccccggcaactggggaggctggggcatgagaattgcttgaacccaggaggtgaaggttgcagtgagctgagatcgcaccgctgcacttcagcctggatgacagagtgagactctgtctc

SEQ ID NO: 308 - DNA, 1793 bp, Homo sapiens
gcctttttaattcctattttttcctctttttcaattttttaatatttcatatattttgtatcactaggcagaagacatttaactatttagagattgcatggtaaagtagttagtattgttacagtaatttatagaatcagtaaaccttagaggacactagtaaatagaatattagaaagggaaactgttgttcctattaatcttcaaatttgagcatttagtttagaaagcacaggctatttgattaggttgcatgtttattacatgtttttgtcctactgcttttttctaacaggtaaagaagcattagggagagttcaggaatggttgtagttaattagggctaactggaattttattttaaaaatgctcacaatacagtgtgtgtggttccttttagtttttattttgagggtggctcttacttccctcatttagctgtgcttcttttcacagggatgcccgggtagttaaagacatggcaactggaaaatccaaaggctatggttttgtatctttttataacaaactggatgcagaaaatgcgattgtgcatatgggcggtcagtggttgggtggtcgtcaaatccgaaccaattgggccactcgtaaaccacctgcacctaaaagtacacaagaaaacaacactaagcagttgagatttgaagatgtagtaaaccagtcaagtccaaaaaattgtactgtgtactgtggaggaattgcgtctgggttaacagatcagcttatgagacagacattctcaccatttggacaaattatggaaataagagttttcccagaaaagggctattcatttgtcagattttcaacccatgaaagtgcagcccatgccattgtttcggtgaacggtactacgattgaaggacatgtggttaaatgctattggggtaaagaatctcctgatatgactaaaaatttccaacaggtaattcgatttttcatagcattctttaaggtttccatcttacatgtcacataaaagctttggaaactctgtaaaatgaccaataaaataaagcatatagctactttcagttgattgtatttcaaaattgattatttgcggtattaactgaatcttaatactttcttttcacaggtgtcaccaccccaataaacttagacaatgataaataacagagtcctattcacataagggtgcttacttagtttttctcttccttgtctcccactctttcttcatatacggtgtttcttatgtgttccctaaaacaatactttgctttttcctaggttgactatagtcaatggggccaatggagccaagtgtatggaaacccacaacagtatggacagtatatggcaaatgggtggcaagtaccgccttatggagtatacgggcaaccatggaatcaacaaggatttggagtagatcaatcaccttctgctgcttggatgggtggatttggtgctcagcctccccaaggacaagctcctccccctgtaatacctcctcctaaccaagccggatatggtatggcaagttaccaaacacagtgagccgggactctaaaaaaaaattgtaattcatgataggcttcgatttcctgtgacactctgaagacatgaaagtagacatcggaaaatgaaaatatttattttaaaaattgaaatgtttggaacctttagcacagatttgctttggtgaaggacacgtgtcttctagttctgcctttttaagtttttgttcatgatggatatgaacatgatttttctttatgtacaaaaactaaaataaagtcaataaagac

SEQ ID NO: 309 - DNA, 924 bp, Homo sapiens
catttgtttttccaagaattcaggtattgaaaaagcttttctctttgatgttgtcagcaaaatctacattgcaacagacagttcccctgtggatatgcaatcttatgaactttgctgtgacatgatcgatgttgtaattgatgtgtcttgtatatatgggtaagttatgtatatattcctgcaatatctcagacaggcggaaaactattaacttgatttgttcagaagactaatttctgaggcccctggcaagtggtactacatgaactgggattgttctgaccatagtgctttaacttggagcatgatttctctggaagttggctgctgggtcttactccttcggagaatggctaagaaaagttggaaagcatgactagaactggacttgtttatcactgcaagtttctcccactgttgtggggatgggggagggttgcactgtgtcttctcactactggaacttagttagattgaaaaactagattaatttatttaaaatggtctgaataacaaagtaagttctggttcctgatttaacctcaggctttgtggaattagggattcttaatctttcagagagcaaagaaagtaattagaattttggatgttggaagaacttataaaaatctgacccatatatacaagtttccaaaataaatctctaaaatttgagctcctcctttatgtaaatttgccaaactcgctatagaaatttatgaaagccagccagcaagtgattttgtagaataggccagaggactggtgaaaactttggagaattactggcttttcaaaagctgataatggccaggtgtggtggcttgtgcccataatcccagatgtttggaagcctggggtgagaggatcgcttggggccaggagttggagaccagtctgggcaacatagacctcagctttacc

SEQ ID NO: 310 - DNA, 907 bp, Homo sapiens
  misc_feature 871: n=a,c,g, or t
cttttgctagttttctgattgatttgcatagaccattgactggatgttgtattttttttttctcaaagctaaactgtatgaaaaatcaagacttaaaaaaggtaaatggaggcagttgcacaattacatttgtttaatgagcttttacattttaaaacttttaattaatgttatactatttcagaaattcaactgtagttataaaattataaagaatgcatttgttatttaaagtgagatatgcgtgcagacacacagaccatggtcttcccttcttcctctggtctactgcttctgccttatatcccctagattccttctcactccccaaaaggcagaggttaagaagaaagttaaaatatcaagacacactaaactgtttttgtggtgagtcaagctgcagtgcctcgctgactgggaaacaatgggctgggcctcctagaatatagtaggctggagaaacagaaaatacagcttgactgggccttgccctctcactccaagcctcaacaggatgctagagctttagcatgctttctgctgtgctgggattattttctgcaactagacaaaaaacccacaaaactccacatggtttgttctcaagcaactggaatatggaaaggcttgaaggaatacttacactttttgatggaaggtaatgaccttagttcttcagtatttattaggtaagcatgggttctgcagtatagcatttaaaaattcatgttcctcagggtttcctaagacaaaatagagtgtgtttggtccagtgtgatggagaagtttgatgcaaatccgtcttaaggaggagaatggaggctgtcatggagtcctgtggactgtttcgcaagtagttgttttccatgtnccagttttacttaacttcagaaaattattgtttttg

SEQ ID NO: 311 - DNA, 2473 bp, Homo sapiens
aagaggttatgccagtggttgatgcagaataatgaatgctttgctttctctggtttatttccttctacttaagtaatggtgtttacccacacattatgtctagtttggcagtcttgaacagaagctggctttggcagaacggattcgaggccacgtcctgtcattggcactacagatgtatggctgccgtgttatccagaaagctcttgagtttattccttcagaccagcaggtaattgtaagtttcccctttaacttttctcttggtgtttgatgtttctccatggtacatgtagtgaaccctgtaattctgtcaattttcagttttcttttatggttttgcattgttgcttatggctgcctttttgtgcatggcaagcatgaactgtgcaaataatttaaacttgttgcagatcaagtatcttgtattaaaacctgtggtatccaatactcttccattggctagaacttagcctttaataggttcaattttataggcggtttttttttccatgaataaagcaggtaaaatactaataagccatcattttctccaacaagtcaaactttcatccaacccaccttccatatttttttactccttctctcctgttctttcatcccaccaacatctattgaacaaaggcctgcccagcatggtgcatagcctggtacattgacctgaagcccactctgtgccagacttcatcagcacagagatgactaacacctgatccctgcccacagagtgcattctggtggggaagagccatggtggtgagcagtggtgaggacatgagaaggacccctcacccttcccagagtccctgagggccggctttgcaggagaaggcaaggctaaagaagagttagacagggaagaaggaacagaaatgagaatgcttaggtgctgtgagtggggaactgaaagagaagtcacctgaacaggcccacagcttcttgacaagtcacggcgtgggtccagtgagcactgcagacaccacagggcccaggaggcaaaacagacccacaggcagggtgtgctacagttgtgtttgtgctgggcagtgcctccagcctccggtgcttctcatctgagcctgcagcttttgggctctgaactcactgagcccttctcaattgaggggttggttggccattgtctggcaatgatgacccacttgccctcactgagaacaaagttcggtaatgagaatctttgttaatggactcaagttctgagccagacaagacacccaccacccctgagtcaagctaaaccaatccaaaccactgcactggtgttggcagtggcagttgaaggctgaagaagtccaaagtttttaaagtgataagtttcaaaggtatgtgccacgatgctggtgaagggagaaaggaatgttggagatagagcaggtctggagttcatttattcagtgcttagtactagagatgtagcattaataagaaagtataagtaattagaagcaagtgtgaagctattttaaattttcttttaatgttcagatcattgccaattttaatttttcttggattttcatagatagttgaattgttcttctttaattttcttgtttttctttctttctttttggggacagggtctcactctgtcacccaggctggagtgcagtggcacaattgtccttgttgcagcctcaacctcctgagctcgggtggtcctcccgtcttggcctcctgagtagctggaactacaggcatgcgccacttcccctggttaatgtgtgtatttttggtagagatggggtttcaccgcgttgcccaggctggtcttgaacccctgggttcaattgatttggcctcccaaagtgctgggattacaggtgtgagataccatacccagcaatcgttgtttcctgtgttatatttttgcacatattttttctggtcatgtttctctgtggtgtcttgttctgggcctgacttatgcttcctaccctttattattttactcttctctagatgcaaatttgccattttgggtaaaattaactcatctttgttggaattttatttcttctggatcacaaaaatatccagggaagccatctctcttcattttgtttataagtattctttgactttatttttgtataagcttcattgtcataattattcccacaattcccatcattcctataattgtattttcagagtaaattattctcttctgggcccagcacagtggcttatgcctgtaatcccagcactttgggaggccaaggtgggtagattgctagggcccaggagtttgagaccagcctgggcgcgcatggtgaaacccacatctctataaaaagttggctgggcatggtggtgcactcctatagtctcagctgcttggggtgctagggcggggggatcgcttgagcccgggaggttgaggctgcagtgagcagcctgggtgacagatcctaagagaccctgtatc

SEQ ID NO: 312 - DNA, 2049 bp, Homo sapiens
aaacgtgttcgctgcccagaagaagggaaggcgcgagtgaggaaaggaggtactgtagctacacttctggaaaattcagtatggacagtctccgacttaggatttttcaactttaggatggtgtgaaagagacacccattcagtagaaactgtacttcgagttttgcattttgatcttttcctggcctagtgataatgtggtacagtacactcttgtgatgctgggcagcggcagcgagccacagctcccagtcacccatgtgatcacgggaatcaacaacccatcctctaccgtgtactgtgttgtcagcttttttggatattgtgttttgtgttttcacattccatcatgtctacaaaatgtccatcagtgtctcctgtttctggtgagatgaagaagaggaaggcaattactcttgaaatgaaactcaagataattgcccagcatgaaggtggcaagccagtaatggccattgcacgtgagttaggactttggcaatccacgatttcaaccatcttaagggataagaagcaaatcagtgatgcagcgaaatcgtcagcatcagttaaatccactgtcatcacaaagaaaagggctggaccaattgatgatatggaaaaattacttgttatgtggatggaagaccagatacagaagcgtataccacttagcctactgatgatccaggctaaggcaagaagtctttttaatatgctaaaagaccgtgccagtgatcctacatatacacaaatgtttaaagcaagtcatggatggttccagcgcttcaaaaggcgtcataattttcacaatgtaaagatcactggtgaggcagcacgtgctggtaatgaaggtgccatagcttttaaggaacagctgcataggataattatggctaaagatctttgcaataaggagctgattgcactggaggaagaaagaggtaaaggcgttgaggcagtggaagaagttacacccacggcacctagaaagttcacagcaaagaaactggccgaggcatttgctgctatcagcagtggcctacacgttagaagaaatggacgtcaattacgagagattcgccacagttgacaggcagatacaggatgctcttgcttgctacagagaaatatgtagtgaaaagaagaaacaagctgtacggtcaaaacttggtatcttcctgaagaacaacactatgcttgctaaaccatcaactagtgttgatgtcccaatgccttctaccacctattctcgatgttcatcagaagagagagaaattgaggaccctgttgcatccccatcatccagcaattaattctatttcagtgcttcaaacatttttcaggaccactgtgctttcagctgtgtaaattaatgatgccctccaaatccttggttatggaatatttggctcatcccagtacactcggcttggctgttggagttgcttgtggcatgtgcctgggctggagccttcgagtatgctttgggatgctccccaaaagcaagacgagcaagacacacacagatactgaaagtgaagcaagcatcttgggagacagcggggagtacaagatgattcttgtggttcgaaatgacttaaagatgggaaaagggaaagtggctgcccagtgctctcatgctgctgtttcagcctacaagcagattcaaagaagaaatcctgaaatgctcaaacaatggaattactgtggccagcccatgttggtgttcaaaggctcctgatgaagcacacccctgattgcattattggcccatgcacaatatgctgggactgactgtaagtttaattcaagatgctggacgtactcagattgcaccaggctctcacactgtcctagggattgggccaggaccagcagacctaattgacaaagtcactgttcacctaaaactttactaggtggactttgatatgacaacaacccctccatcacaagtgtttgaagcctgtcagattctaacaacaaaagctgaatttcttcacccaacttaaatgttcttgagatgaaaaataaacctattcccatgct

SEQ ID NO: 313 - DNA, 1571 bp, Homo sapiens
accaactacaaagaatatcctgtgtctctttctgcagtaataaatttcagagtttaaagatcagagtctgcatcctctgtgcttgcattgctcattatttctttctattgacttttgggcagagcctaaaaatgttgggcgttaggagtgtttatactattcccatacaactctgtaaaattccctgctttaattagcttcagtctgatgcactggacggcttctctgtgcttctctgacaggcagacttatataaacagctgttctttgttggatcatgagaggagcttccaggccgaaggctactttaaaaagtcgttcatttttgttctcagatattttctctccagtatacctatcactgttgaatgttccccccaacttcccagtagtttgggttttagccatttcataccaatttatacttgtgctatgataacttttctaaagtctaaaacctaaacaaatagctggtggtgatattactttatgttcctgaggtgtagaaagctcttcagaatagcttctgctctttgtgagctccatatggcagtcaaaattaatgaaattaaaaaacaccatgcctggctgatttttgtattgttggtagagatggggttcaccatgttggccagactggtcttgaactcctgacctcatgtgatccacccgtaattcttatattatgtacagatcaaaaggatggtaagattttatgactgcatattgttgaaccatgagaacacttgggttgcatcctccatgccaattctgatcatttggagcccatgcatcaggaatgctggccatcatctatttgtggtgtctgcaggttgtagggaggtgggggtgcagatacatgtcatgtgctggctatttgctgattcagccataaaatctaaaatttgtcttctaaaatgcatgatgtagctgggcacggtggctcatacctgtaatcctagccattttgggaagcaggagaatcactttgcacccaggagttcaagaccagcctgggcaacatagcgagacactacctcaaaaaaaattacaaaaatgagtagggcatggtggcacatacctgtggttacagctacttgggaggctgatgtgggaggattgcttgagccaggaggtcaaggctgcagtcagccatggtaacaccactgcactccatcctgggtgacaaggtcagatcttgtctcaaaaaaaaagataaaaataaagtgcaaaatctcaagtggttaatacccatttttgttagtaattcaagagtttaagagttcccagctgggctcagtggcttacatctgtaatcccagcactttggaaggcagaggcaggaggatcatctgaggtcaggagttcgagaccagcctggccaacatggtcaaaccctgtctctactaaaagtggaaaaattagccagacattgtggcagacgcatgtagtcttggctgctcgggaggctgaggcagaagaattgcttgaacccgggagttggaggttgcagtgagccgagatcatgccattgcactctagcctggatgacaagagtgaaactccgtctc

SEQ ID NO: 314 - DNA, 1066 bp, Homo sapiens
atcctgccctccttccaagtttttaagactgtagcagtggtaatgagtagcttgtttaatgaaaatgtttcatcctggcatatcatgcttgtctttttagtggatatcaaagtattgcagagtgccttagcagccatccgacatgcccgctggttcgaggaaaatgcttctcagtccacgtgagtccctccctaaccatttggattaagataaactttttaactgcagtgaatagcaggatacccccatacttcctctgacagaactattttgcctgtgacctcgtgtctggatttttatttttaccttaaggaagcaaattaagatttagagaaagcagagaatgtatagttctggaaatagcatagtcagcttcaattctaccttaggcatggaaatacatgatcgtattgattttaatgtttgggtcactattactttcagagttaaagttctcatcagactactgaaggacttgaggattcgttttcctggctttgagcccctcacaccctggatccttgacctactagtaagtaaagatgggcaattggagttcctcatcatccttatttactggtagtagtagtagtagtagtagtagtagtagtagtagtaactctgaaattcaccagagtctgaaatttggtgaagcttaaaagaaattttattggtagacaagtaatccaataaaaattcaacatttacatgactcagagacatttgtttaaaaaaaaagaaaaaattcaaagtttttttttttttttgtatattcaatgaaatgagtagttactgagttatagtgtcccgttttcttctcatgactgctaccatttaatcatggtagtagagagaaatgagtgagcagccatttcagaattgcttctgaacatgaaaattttggctagacttagaccttaatgaccagttttcctcgtgatcatttaaggttttagtttgatgcctgtaatcccagcactttgggaggctgaggccagaggatcacttgaagccaggagtttgagaccagcctgggcaaaatagcgagactctgtctctacaagag

SEQ ID NO: 315 - DNA, 1174 bp, Homo sapiens
  misc_feature 1138,1139: n=a,c,g, or t
atacattctaagccccaagatttggattttcacaaagcgcttataaacccacccaactgagcttcaacacttcttagaaacagatttggtatactaagcttgagcttaccattacagtgttttatgcatgaaagtgccaagtcagagaaaacatgagtagagaatggggaaggagagagacggaaaagaagccgttgcacgagttttaactgatgagaagcacattgtcaggttctgccctggggaatcccactctggctatgtctgcagggatggtagatgaagaacacagaacaagaatcatagaagataaggagccacaaaggttcactctggtttcaaaggtgcagtcaaaatgttacacttctaaactgtggcaacgagacacaccctgaagaaagagagcgttacaccttcacaagaaaacagagaaaccaagataccttgtgatgtcttgtacataccaagaaaaatatgtcctaaccttgaaagcccattttgggtgtgagtggaaccacatcattacaaaaccaaaaagctgtatctttctcatccactataccccttcttttccaaatggacacctgagactttgagctacttcatacaacagagtttcacactgggacctcccacgtctacctgcatttcaggcccgaatctttcctggcatcagatttatcatcaagaacctttctgtggttcatttcttggggcacaattctctcgtgatggggactaatcccgtcaaatcatccatttttgttaacattaattgtgatatccattccaggtatctgctttgtgtataaaaaggaaatttctgaagatacagctttatgtgaaaagggagtgattttggttgcagaggtttcatacataatgggaggctggtgaaaaggattattccttgctgaaaaactctggaaaaatcatgccatacggaaggctgtccccatggcctatgcatggattcggtgctgtgggggagggacatactctttccacttttacaacttcctgatgtgagtggttcactcccgggaaagggggcaatgcctttgtactgccactttccccccaggtttcccgcctgtggggtggagggtaaaactaaaggcggggtaatccggcgcgnncatgaacaaaaatggaaaatagtgtcttggcatgc

SEQ ID NO: 316 - DNA, 2083 bp, Homo sapiens
aaaaaatgtgctaaagagtgagtgcccttacttaatttctggttaataaactaatgtgagattaaaatagacaaggagaactgtaattgcatttttggtgtggacagcaaggtctgtagagagcacaaagtttaacaggtctgcagtgaatgaaaaagaaaaacccccacaccttgacagttaacatcactttagtttatggcttgtttagttttaaattttataagtgatcaaaagttaaagtttgtggattacacgatctttcattcgcccttgttgatggattggttcctgctttcctgagtttttaatggaaacaattatatcatataagaaactatctcacttgtttctattccctggcatcatatatggaaaaatacagcagttagttgaattgtctgctagaaagtggcctttaaaggaaaatataagtggaagaaaatttgcaagtgtgtacattaaggttgaagtgaaaaggggaagggagaaggaggaggatgactgaggtcacattccaatttttgaagattatttgctaatgttcatgaaggaagttacagttgcctctgaaatgtagtacaaattttttgaggtcatttaaacttgtattataaaattcaacatgattagagattgtagggaaatcatatctgaccttggctatattgtcaaaacagaattttctatctaatttgaatcaagaaacctcactttttcctgtgcaattgaagtgagtatttctggcaaaaagtatgtcttctaatctaacagtaagatggagagataatttaaacaaacagcttcaagataaaactaaaaaattagaaaaattgccgcagatttcaattctgctttgattttgaagacctggagagtggacatcagcatactttgttctactcagtagctatattcttgaaaagttgtatctgaaaccaagttccttactgaaaaataatttaaatccactcaaattgcttgagctaaaagaatttcattgtgactcttcttgtacagtgaagaatgccttcataatgatcatgccaagtacatacatgcagtcattattattattattattattattttttttttgagatggagtcttgctctgtcgcccaggttggagtgcagtgacttgatctccgctcactaaaagctccgtctcccgggttcacgccattctcctgcctcagcctcccgagtagcttggactacaggggcccgccaccacgcccagctaattttttgtatttttagtagagatggggtttcaccatgttagccaggatagtctcaatctcctgacctcgtgatccgcctgcctcggcctcccaaagtgctgggattacaggcatgagccaccgcgcctggcctacagtcattatttttcaagttctgatttatttgtgatggtagtttgtttgctcagtagatcaggtcttttttgtttttgttgttttttgttttgttttgagacaggtcttgctctgccacccacgctggagtacagtggcacaatcagagcccactgtagctttgacctccctggctccagtgatcctcccacttctgcctcctgagtagctgggattacaggtgcatgctgccacatccagcaaatttttaatttttttgtagaggtgggattttgccatgttgcccatactgatcagtaagtcttaaactggtgatcccctctacttcattgcaaaactcattgatatccccaaaaatcaaaggcatattttaatatttctcaaaaccagggctgctaactcagctgacaaacagggaaaaaaactattattccttttccctcaaccagtgcctcccactaccctgcccagaccccagggattcctgggcagataccactgtgggctaccctagccagccttttgcagccccattcctgcttgcttccccacacctccccagccagagcagacctggaccccaacagaaatattcacccctagcggcaacactagcactctcttggacaaatgtttagtgatctatccatcacctgccacatctcccctccactcccctgcttaataaactctaaaaatcc

SEQ ID NO: 317 - DNA, 1251 bp, Homo sapiens
ttaattctcccaccatctactgcctgcctggactgctgcattaattgggattcttttggttgtaagtgagagaaatacaactgaaactattgtaggcagaaagggggatcttaccattttgtgcattcatgaggcggcatgtctaacttaggaacaatccaagaatttctccatctgctgtaggtgggcccatttccaaaaaatggacaaagtcaaaggtcacagcagttctgggttaataagatagccttccatcctggccacaaccagagaggatgctgggaatgctcttcctggctccagtctcatggaaggattctgattggtccagctcaggtcacgtgcctctcctccatggtctggggcaagatgtgctaggcagacagatacagagacagcagccctccttgcctgcctctgcacagtggatcttgacattgggaattttattttattttattttattttatttttgagatagaatctcactctgtggcccaggctggagtgcagtggtgcaatctcggctcactgcaacctccgccttccaggttcaagcaattctcctgcctcagcctcccaagtagttgagattacaggcactcgccaccacacctggctaatttttgtatttttagtagagatggggtacaccatgttggccagtctggtctcaaactcctgacctcaagtgatccacctgctgtggcctcccaaagtgctaggattacaggcatgagccactgtgcctggctgacactgggaatttgagatggagtctcggtgtattgccaggctggagtgcagtgcagaggcgcgatctcggcttactgcgatctccacctcctgggttcaagcgattctcctgcctcagcctcccgagtagctgggattacaggtgtgagccaccgtgcctggccaaatttgtattttcaatggaaaattcagtaatgtggagaagagttggggggaaaaatggaaatggggaggccatttaggagactaattccagtcccaggaagaatataatattagctggggacaatagtaatggaaatggtgagaaacatcttgatttgagagtttaaatctgaggaaacttgtgatagattagagatgaggggttcatctctaattctctggtgcaaaaccaaaagactgtgtggtgccattgctggcagagagaaaactagaagaggaacagattttagggggagaataacatgtgtttctgcaaagcctggaggcaac

SEQ ID NO: 318 - DNA, 787 bp, Homo sapiens
agcgagtgtaatcattggttcatagggtatgcatgtcctcatcttcagtagatgctgctgaacattttctaaagtggttttaccaatccctactcccactaacagaatgtacacattcctattgctccatatccgtgccaacactcgatatttttttactttttttcccctataacccaggacagtgctcatgctttttaatttgagctgttctggtgggtatgttgtggtattataaataaatatacgcaaatatctaagctttgacaattgaggaggtatcacaaggaaaaacaccaagtggaggttggagaaattgtatctgttgggggtttatttgtagaaaagtatctcaagattggtagctccacaatgatgcagctttttgaaggctttcatttcttaatataaaatagtgtattaattttttgtggttataagaataaaatatgcagtactaactaagtgcctggttgtgtcaggcactgggccaaatatataaaaatcattttgaaaattttggaaaacagaaaaaagtatatttgagaggctgaggcaggaggatcatttgaggccaggaattcaagaccggtgtgttcaacatggcaagcctctgtctctacaaaaaactaaagaattagcagggtgtggtagttcatgcctgtagtcctagctactcaggaggctgaggcgggaggatcacttgagcccaggacctcaagcttacagtgagctatgatcatgccacagcactccagcctgggctatagagtgagaccctatctcc

SEQ ID NO: 319 - DNA, 1282 bp, Homo sapiens
ggcagggaggaaaggaaggaaggaggcagagaagaaaggaaggaaagaagagggaaaaaggaaagaagggaggaagaaggggaggcagacaaggaaggagggaagggagggagaaaaaggaaggaaattatatttttcacaaagcacttatatttacctctataaaattaatatactaatatgctattttaagtaacataacagaggagtatatgaagtctaagtgtataagtaaaaagttcatatcatgcagatttcaacttttccattacacaatggcttctctttctgcccttcccaggtcctgtgtcctaccccttccctgttatttctttatcatgtcacatgcaggtgctgctctactcacacatggcggcccttataatgcacacccagcctctctacaaaaaaattaaaaaatgaattaggcatggtggtgtgtgcctgtggtctcagctactcaggaggttgaggcaggagaattgccttagcctcggaattggaagctgcagctgcagtgagctatgattgtgccactgcactccggcctgggcaagaaaaagagaccttgtctccaaaaaaagaaggaaactggagcctgaggcttccacctcagctttctgagtacctgtgactgtcggcatgtacccccatgcccagcttatttttgtatttcttatagagacagggttttgctgggttgcccaggctggtctcaaactcctgggctcaagcaattctcctgcctcagcctcccaaagtgctgggattataggggtgagctcctgcacctggccttagttctgaatccttttttttttttttttttttgagagggagtctcgctgttgcccaggctggagtgcaatggcacgatctcagctcactgcagcctctgcctcccaggttcgagtgattcttctgccttagcctcccgagtagcaggattacaggcaactgccaccacacccagctaatttttgtatttttagtagagacagggtttcaccatgttggccaggctggtatcaaactcctgacgtcaggtgatccacccacctctgcctcccaaagtgttgggattacaggtgtgagccaccacacctggtctctctacgaaaaaattaaaaaatgaatcaggcatggtgttgtgtgcctgtagtcccagctacttaggaggctgaggcaggagaattgccttagccttggaattggaagctgcagtcagctgtgattgtgtcactgcactccagcctgggcaacagaaagagaccctgtctcc

SEQ ID NO: 320 - DNA, 2497 bp, Homo sapiens
gccattcttctgcctcagcctcccgagtagctgggactatgggcgcccgccccaggatggtctagatctcctgacctcgtgatccacccgcctcagcctcccaaagtgctgggattacacgcgtaagccatcgcgcccggcctgttacagcaaattctaaatgatgcctccaacaaagagattaactccattattaatcttctggttaatgtgcttggccaggatagagggagttctgtgtaaaatgaagtgatagagagctcacacacaaatgcactgcagggtcttggaactggaaggcatctgaattcagccttctcattttacagctgtggaaactgatgcccagagagggacatgccttagccagggccacacagtgagacacaggtagagctggatttggaagcagcatcctaatgcataaagctgtctttctccccttaccaggctgcctcctgggttggacccccttgggttctgcactgagtccatccacactcatccttttgggctgagcaggtcctaccctgtgcaaggcactgggccaggaactaggcatgcaaagagcggggagggcagtgcctgccaggactggcaaacccaagaggcaaaatgatcacacctcagggccccaggagagcatgagcaccaagaacagtgaaagataaaatacagctttgatgaacttcttcagaatcttgcaatcagaaattctgcaaagaagcttttaaaattgcatacccctgttaagttttgtgttttcacaatgggagtggtttcattttcagtttcatctgggagtggggcacggtaagtttttcaatgcctgataagggggatagacctcttagagtcaatgacaacacaggtcactccacgtgtactctagaatgctagggaggctttgagagtccagagagagctattaactccacttggaagggcaaagttgctgtcaaggcctcacagaagtggagatgctggacatccccaaggtggaggggagagggccccgggcccacgccaaggctgccttctgcccagctgtcctgcctctgagccccctgccctgcccaggaaagtgcgagcgcctgtcaggcatccatgtgtgccacttgcagcttcaaatggcaggacatggatatttataacccagaaggaagaagaaagccctgccacggtctctacaccctgctaactgggggcatgtgttggcccttcatggttcacctgcttcctgcgtgtctctgaacacagagatttcacgctgtgattgcatttcccaccgcttgtcctggctcgcagcagccagcctgcaggctataggctgcagagaagctggcaaggagagaaaaacaaagctgttgagggctttttaaaattattttaaaattttattatttttagctgaattcaatttttttttgagacaagatcttactctgttgcccaggctggagtgtagtggcgtaatcacagctcattgcagcctcaacttcccatgctcaagcaatcctcctgcctcagtctttccagtatctggaactacaggcacgcaccaccacatctggctaatttttgtatcttttgtagagacggagtcttactatattgcccaggctggaattcctgggctcaagctatctgcccacctcagcctcccaaagtgctgggattacaggtgtgaggtaccatgcccagcagggagatccctttaaaggacaaccccacgcaggctgacctcagcaggggccacttctgatacaaagtacgttgcgccctctgccctgccccatgcagctgcttctcttggctatgtcactgtcacctttagactttccaagtgcaaagcaactaccagtcctctggccctcaagtcccagggacacatgtcaagctctccacatgatcacctgaagaccctcctacattattgactcattgaacaaatatctactgagtgttggccatgtacccccggccctattctaggcacttaaggaaacttcagagaacaaaatagatgcccctgtggtgcttatgttccagcaagaagggtcagacacatggaaccaacccaaatgcccatcaatgatagactggataaagaaaatgtggcacatacacaccatggaatactatgcagccataaaaaggaatgagatcatgtcctttgcagggacatggatgaagccaggaaccatcatcctcagcaaactaacacaggaccagaaaaccaaacactgcatggtctccctcataagtgggagctgaacaatgagaaccacatggacacagggagggggacaacacacaccagggcctgttgaaggggggcaaagttagggagagcatcagggcaaatagctaatgcatgcagtgcttaatacctaggtgacgggttgatgggtgcagcaaaccaccaatgcacacgtttaccgatgtaacaaacctgcacattctgcacacgtatcccagaacttaaagtaaaatt

SEQ ID NO: 321 - DNA, 1645 bp, Homo sapiens
cttacatgatcatagcctaccacactgtctgcacgccccgggatcttgctgtgcctgcagccctcacgcctcgagccagccctggacacagcccccactatttcgctgcctcatcacccacatctcccaatgcattgcctcctgctcgcaaagccagccctccctcagggctgtggagcccagcctatgcctcccactaggccgcgtgaaggttcccggaggatgggtctcagccgagcctcgtgcacccccaagatggaacatccctgctgcattcacactggaacaagcccctccagatgagtgccccggccccaggccagcttcactgccgtctcttcacacagagctgtagtttcggctctgcccattagctcattttatgtaggagttttaaatgtgtgtttttttcctttcaagtcttacaaagctaagactttttggctcattcctttttgcatggttgtctagggtttctggacaatgtgctgttgcatttttattttcctagccttgctaaaatctttcccttctcaagactttgagcagttagaagtgctctttagaagttgtctgtgggtgatgttactgtagtggtctcagggaaaggattgtccagttactttagggggtttttggtggggtttttccccctgtgaaaacttactttgcccctagtctggctgctgctaggacttctgaggagcaatgggacatgagtgtccctgtatctgcgccactgccgcaagggaagcctcaggaaccagcacctggaggccaggatagccaaaccctgggtgagcgagaggctggagaacacaggagctcacccagggctgctgcccaaccatgggccactgtgaacagacttcagtcctctgtttttgtttcataagccgttgagacatctgatggacttggcttaggccctgctgggacatcccacgtgtgatccctttcactccatcaggacaccaggactgtccttaggaaaatgtccttgagatggcagcaggagtcatattttctgtgtgtgtgtttcggaaagccgctgtgtcctgcctcagcacaaagacccagtgtcatttgctcctcctgttcctgtgccactccagaacctcagcagatctgagccaccgcctgccagtgtgagaggcggccactttcatggcagctcatcaggcgcagggccccagacagcttcccagcaggccctagagcccggcctgggccaatgatggagggcggccgccagcccagggcctgcccatccagaagggactccccagggcctgggggaggagacccttggaaaagtcctctcttcccagctcctgattctggatctgagattctcagatcacaggcccctgtgctccaggccgaggctgggctaccctcagggagatccagagactcatgcccatggccatccatgcgtggacgctgtgtggagagtccaggatgacgggatcccgcacaagctcccttcagtccttcagggctgggccatgtggttgatttttctaaagctggagaaaggaagaattgtgccttgcatattacttgagcttaaactgacaacctggatgtaaataggagcctttctactggtttatttaataaagttctatgtgattttttc

SEQ ID NO: 322 - DNA, 3657 bp, Homo sapiens
atgaaatgtttcgtgatgttattttgatatttcccttgcagtttaaagaaagtaacttcttttttctgtgtgtcaattggaatgtgtgtgtacattatagcaatgaccagaaaacaatttttaatatgtagtttatagttactatgtagaaacttttctgaatactgtaaaaaattattggtgcataaaatttgttatattacatgcttttatgtattatactcttccatatagtggggatatatatttacttattttattaaatagatctattgctgatgctgatatctactgcccagtgactacagaagctcctttctggacaacccgtttattacactctccatgtatccacagctatatcagaaaagcaggaaaccagagaaaatatacctatttgaaagtggcatgtcagctgggatgagagagaagagtaagaatgatggatagttttagagaataagactgctttcaggaatgaatgaagacaagcatccgagcacgtccaatgccatgcttagcaataacccacacaactcactggccaaaagtacactaagtctgtaatcggaaaaattctctggaataaaatagagactcatatggaagtattcaggtgaaaatatacatcatatgataaatagttctgtcaaagttaggaaactgagtaactgagagagatactactgtgagagaaattgatttgctgtgatttgctgtacatatgtatcagaactgcactatgaaatatggtaaccagtagccacatttgactacttaagtaattaaaatcaaattaaaaattaagtctttctcttgcactaaacacatttcaactgctcaacagccacgtgtggccagtggctaccatattaaatggtgctgatagaaaagattgtatcattgcagaaagttctataggacagtttctgctcatgggagaatttcttctcaatcaagagaggcacaaagattatgatactattctttgacaagaaataagtccaacaagctagttctgactgtgtgcgactgtagtcctagttacttggaggcttaggcaggaggatagcttgagcccaggagttcaggtctagcctgtgtggtaccttggactgattattggatctctccagagttggcaatgcacaagataggacagcattctagcctaactcctggttctctcttccctttcccattttccttacgttgtcatttcctatgtacttcttttaaaatttattttcgcttattttcttgaatgtgtttatgcaaactaaatctttctggtgagcgattgcagattaaagggaaatggcctattctttctctttctgcctttgtttctttacatgtgaaaaaaagattgatgtcatttgtttgagaattaatgaattgatcacttggagcaattgtaaacatgtggagcattatatacagaatagcatgtagttcagaagaaaaccaggtcatggctttaggaaaagtcatggttcctaaaagttcggtgaattaccagattagaaaatcttcacacattcattagagtagcatttaaatactgtgatattaaacgttgtcatgtgtttggataatgtgaagtttgtgcctcacttttggggtccacctgcttaacacttggaaaaatcttgaaggcccagatttttagagctgaaggtagatataagtctgttttaggtttaatgttttaggaacacattaaaatacttctagtatcttgccattttctgaatacctcaaaacgcttgaaaggcacgtgctatgatttgaatgtttgtccctccaaaatgcgtgttgaaatttaattgccactatatcagtattaacaggtggaaactttaagaagtgatgaggctatgagagttccaccctcatgggtgggattggtgtcaatataaaaggtgaattcggccccctcttgctgtatctcgccccttgccttctgtcacgagatgacgcagtcagaggtcctttgctggatattagcaccttcccagcctccagaactgtgaactgtttatcctaaattacccagtctgaggtatttcattataactgcgaaaacagactatggtagtgcataatttaactttgcatcatctctataagatggataaagggcaattgtaaactttatccttctataaagagagttgcaaaatttaaatttcaataggattaagtaaattattggcattattttgttcaatggcaggtagactgaaacaatgtaacaccttctatcacaaacttattcaataggttattactaattatttgatttaaatagacactaatcccttttttttaaaattagtaagataaatggatttcaaagaattattgcaggatgataagatgaggaacaaaaaccaaatgtagaatttctcaagagaacggtaatgtagaatttttgaaggtgagcaaagaaaatttattggataatattctaacattatttttataatgaatttaattttaaaataaatgaagaactaattgaacatttagagtaatagtcatccttagtgaatgtgaaacaaatagtgtagctttatttgtggaaattgttacagccccattaggttgctattcatggtctaaatgaagttaattgtagcttcgaaatttgtatgaaaatgtaaaaaaagttggctcaaaaattccactttatctatttattcatttttagttttgtcatcccaaagatgttttgatttttgtctcaaagatcatgggaacttcttaaagcaatggaagtatctaaaaataatatacatactaaaaaaaagaaggcttcttttagaaaaaacattatatttagatgatggaggtttaatttttttcataaagtgatggtgctgctggaaacaccttgttttctctgagaaacttatacagaaaggaatagcagtagaataaagattttgaacttcttaaccaaaggaacctagattgtcacttcagccaccataaaatgtatctattaatagatactaaaaagttatggctgtttacggttttatgctgctgtcagcttgacctataggcaatggaccaggaaagagatcaggtcaagtgccatcaactgttgctaaaaatggcaacaaagtagagtggaaatcagaaccagatacttgattttcttatgcctcaaaatgttggagcctcgggtaggagtaccacacagtccattactctatgaactttgtgttgtcttaaaaaggacacaatcccaagagtcctgtaagataacttttaatgataagtaaacatggaagccagttgaattgccctgctttagggccttctgaagtaaacattgaaataaggaaatgtgaggccgggcgcagtggctcacgtctgcaatcccagtactttgggaggctgaggcaggtggatcactcaaggtcgggagtttcagaccagcctggccaacatggtgaaaacccatctctactaaaaatacaaaaattggccggtcatggtggcatgcgcctgtagtcccagctgctcgggagactgaggcaggagaattgcctgaacccgggaggcggaggttgccagtcagtggagatctgccactgcactctgtagtttggagtttgggtgatggagtgagactttgtctcc

SEQ ID NO: 323 - DNA, 1687 bp, Homo sapiens
tcctttatccagcttccattctctcagttatgaggctctttgaaaatgtcttaactttgatgtaaatttttaaagccaacccctcatcaagacagggttggtttgggtcttttgtacacagggtctggaccttctcattgtgtgcctcccaccagcgtgcacttcgtatgtccagccctgggtcccttcagcagcattgtgcgtgtacaggtttctaggctgtaagactgaatgaatgtacatgtgtttatatcctctccatatgtacagtgtatatagtgtgtatgtgtacatagatgtatattatgtatacagacatgtatccaaactttcctttaaagagagtttttcataaagttgctaatgtaaactgatatgggtgttccaaggtccctcggcagggaagatttgctggtgattttcttcactccattttcctttgggtgagcctgcctgggaagggccatgaagtcagaatctccactctgcaaaaggaagaattccaggcagaagaggttctgacagggtgacatttccgtatattctctaggttcggacaagagccaggaagctggaagacagtttatcttaatatccaaaactaagtgggaatttttaaccttttcatgcacctattcatggccctacctggaaggaacttggcagttgggttgagccatcagccttcccagctattcagctctgttgagtagcccagagacaggcgtcacggtcagagattcagaacggtctgtgtcagtgaggcctgactcccaaagatggtagcaatttcccaggcttgcgctgtgctcagtcagcaagatgtggggcactgtcctatgactgaataaatagtaattcccatctttctatcgccagttaaaaataaacaacctaccaagtattattctttaaaactaagcatggatgttgatggctaacttctgcggcatataagctacagatctcaagttacttctctaactgtaagcatgtaaatgactttaactcctttctataagttatgattttaaattttcagataagaattgcattttaatatggatatgtgtgcccttaaaagctacagataccaaattttcctcgtccaggtctactcggacgaattttcccccttaatctggccttaaactgagactcggcccttgagagtcagggcctggcccagcaggagttgctcatagacctgggaagcaggggcctgctggaaggaatcactagattgctgcaaaaactcacataatccacagtttcctctttttctttttaaaataagttatcaaaatgttttaaaaacactttatgagaccatagtactcagtgccttttgtgagacagtgggtcatttagccttcagcttccctgtttttgatgtagagaaagcttctatttcactggcctcatcccacaagattgtgcgacctttccccgtcatagcctgtcgtgacaatcacgctattgaaagtggctttctagttaaaatgcaattggaaacttgacagtctctaaatgaattaaaagtttcctttggggctatttagcttaacagcagtctacaaataattaaagtgtgagcttaagaaaagtatctttgcggggagaaaaatgtcagatatttttaatgcccagctataaataattttggtgtcttgatatttatacatgc

SEQ ID NO: 324 - DNA, 2356 bp, Homo sapiens
gtataatgggcttgatctagttttaagacagttatagcatgccgttgcttatacatgacattggatcacttaacgggttttttttggtacaagttagatagactgtttatagtatcttttgggcattgtttaaagcgcatattgacttgtcagctggtaagagccagggttggctaccctgtatatttctttatcttagtttacctcctcattacattgttatatggacataaatgaccctgtaaactaagttttatacatattgggaattttaatttttagggaacgtttacttgaaatcccctattgtttctgttttagtgttttctcttcattgtaatgtttttatggttttatttattaattcagcattcattggagcactgcctgctccctgtctcaggtgggtcctggaatggtgcggggagagggatgccagttggtaagatcttatccctgccctcaagtacctcacagtttggtctcagccaattaaagtgataggtatataactacatttttttttcagataatgatgttcagggagaactactagtaaaagcatactgaataacacccatatgtttccttttgttttagtgctccaagggtataccattcctaaaggcacattgatcttacccaacctgtggtcagtacatagagacccagccatttgggagaaaccggaggatttctaccctaatcgatttctggatgaccaaggacaactaattaaaaaagaaacctttattccttttgggataggtcagttacacttttttaaactgcataatttttaaaagaagtagaactaaaataatattttattatttcatgttgttttaaaaatgtttcattcttggcaagctaatataagagaagggatcaataatttagacaaggcatctcccctatgttcatttcagattttaataaagcagttggttttaaatctctaaatgtgactagaaattttactttcagagctgatcaggtaattttggggggtcccagggagctacttaagagcaatttctgatctggtctggtgggtgagagaatgggttctctaatctcaacagttcctcttttaggttcctagattaggaacatagaattctttctgtggaaaaagggaggctctagggattcttatctgaatttttccgccttaatcttccaggcaaaagtggaggaaagaggtaagtaggcacagaagagacaggatagctgccacactggatctgtctctagttcctgtctagaatggggataggtttttatgagtaagagttaaaatgtggatttgatatgtaaaaattctgatcagcatatgctgtgggaggctatgtggtatatatggcaatttgacttaaaaactccatctgcatttagaatactcaatttagatatttcatataaatttgtactttttgaaataggagaagggatggtattataatccttcatttttttctgatctcatttttagggaagcgggtgtgtatgggagaacaactggcaaagatggaattattcctaatgtttgtgagcctaatgcagagtttcgcatttgctttacctgaggattctaagaagcccctcctgactggaagatttggtctaactttagccccacatccatttaatataactatttcaaggagatgaagagcatctccaagaagagatggtaaaaagatatataaatacatatccttctaagcagattcttcctactgcaaaggacagtgaatccagcaactcagtggatccaagctgggctcagaggtcggaaggagtgtagagcacactgggaggtttcatcttggaggattcctcagcaggatacttcagccattttagtaatgcaggtctgtgatttgggggatagaaaacaaagtacctatgaaacgggatatctggattttacttgcagtggcttccaccgatgggccaatcttctcatttcttagtgcctcagacatcccatatgtaaaatgagagtaataaaacttggcttctctctacctctcagcactaatgatggtcaaatgccttacatcttttctgatatctctaaaatgctgttaagttctggagaagaacttcaggagaagaagatctatcagctggcttttaaagacctatgacaacatgaaagtggtgttcagcttggaatgctttgtcagagatgggtgtggatttaggttatactgggggagaacttttctcagcacagattctatgccagcttctttgggcttgttctgtcactatctttttgtttatgattttagtttttactttttgtagatgtgggatgaagtggactctgtcgtgtatattgagg

SEQ ID NO: 325 - DNA, 1224 bp, Homo sapiens
gttcttactcaatgacatgaaaaccttagccagatacatctaaaaaaatgttttggtcttggttgtctagctcctcttttgtagcttatttgtttgtgtgtgtgcacatgtgcgtgtatccatacatgagttctgctatgtattttatgctagacaacgtcctgtggtggttgttctcaactgggtatctatgcctacctgaactgaatgtgttaattacagagtgctgtcaattcttcagtctgcaattatcaacgttcttcaactatgatatttccatagctttagcaacatagatctgtgcaaatatggtacctgagaagatggaacatccttccaaacatgcactgggaatcacctcatcacacatgactattttgagcaggattttatatgctgccatgaattttgataggagaaaaacttctgttctcttaaatctctatttaaaaaagagagagggaggcaagaagaaaaaaaagcaagcctgcaattatctactttttttatacaatcaaatgtttcctacacttacagcagctatagttaaagaagtccatgtactaattaatttgaatttgctgtttcatcattgcatgccaatttatagacaatacaagcacacacaaaattaagttccttgaacatagttagacttaaaccaatgttaatttttatttcctttcaaagtcattatctgcttttagattggactttcattttgtaacaaagagaataattttttaaaattatattttttaaaaatagagaaagttggctgtttttgatggcccacagaaaaactaaaatataattaagggagaacagatacataggtatgaaacttggttgggtactttcactgatacttgcacaaattacatatttacctatgttatgccacttctagaagatgcttgtttaatatataacattatcttttactgttttcaccttaatttaatttcaaaaaatctttttataaatggctagtatgttttgtaaattcatgcattcaacaaatgaccatccacagatactgcatgcaaggctctgtgctgtcctctagatgatgcagagatggttgatttctggaatctacccacagatgccagatttacaagaggataataaagtttaaacatgttcaataccaaagatggtttttggtaataccctgcaaaagtttagacaagacagaaggctgatattttcagggaaagc

SEQ ID NO: 326 - DNA, 1931 bp, Homo sapiens
aaatgattgcctaatatttacctgctacataacgttttaagtgtcttgctgaattctaagtttttccaggctaatgaataagtaatgtggatgtggaatcagatttttgcttgagtctggtggtgactcaatataatacacacagaaaagtatcagttcttctgtttcaagcaagcatactatctctggtggccttcctatttttgaagttgctgttaggatactttaatccttaacatgaatcagtataaaagaaagcatgtgggtggttgtgtttgggtgtcctttccatccacttggtgcttttattttctgtggttgttttattccacagcttagcaacagcagatttccaggagaagtcttagttcttcatctctctctccttcctctggtctggttggttggtaacagtgagagtaaatgaaatgctttttgtttttctgtcttcccaccacagtgtctttggtttacttttaggaccctcattttcaatctctgagccagaagacctgcctttaaatcacagcatttcaattcctccctcctatctaggcattcctttatgtttctacagtactctgcatgcatccctgttataaaatgtatcacattgttttggaattttccaaagttgagctctctttctaaataaactgtacttcttgaggccatggaccatatttttatcattcatacatacctgttacgtaacacaatgcttggcaatggtgggtgggtgactggatggaagaatgaatgaagaagcttgaagagagctgacttatgatgctaccatatatgatgatctctcattcatgtccacccacgttaatgattgatatatatcttggctcactcgaactttagtaaatatgaatcatgctgtgtattcaaactttttagcagagaaataataaaactccttttgtaaaccaaagattgtaccaccatctgtgttttgtttgttttgggtttttcttttctttctttcttttttttttttttttcccccaaaataggttcaaaaacaaacaaggctaacttgcacctaagattgaggagttttgatgcagtagagtagtaacctcctgtattttccagcttgctattgtaaattaaaatacctatttttgaatttttaaaatatttatacattgattccaatagaagtataaaagaggagaggtagttcttttaagataataaggaacatgtgttatggctcaattcttgattattattgcgactgtaagcaatgtaagcaactctgaatggtttttaagactttctttttctttttaggacctctttgtttttagacatgaattggccataatgagactagcagcctttatgggcattactatgttagttggaataactggactcttttacactcaactaattggcatcatcacaaaagggagttctgggaattatgtaacaagtgtaatttgatgagaccaaagcgttcccatcactgtagccgctgcggccactgtgtgaggagaatggatcatcactgtccatggattaacaattgtgttggtgaagataatcattggctctttctgcagttgtgtttctacactgaacttcttacttgctacgcactgatgttttctttctgccactattactattttcttccactaaaaaagcgtaatttggtaagaaatgtttatattgggaggccgaggcgggcggatcacgaggtcaggagatcgagaccatcctggctaacacggtgaaaccccgtctctactaaaaatacaaaaaattagccgggcgaggtggcgggcgcctgtagtcccagctactcgggaggctgaggcaggagaatggcgtgaaccccagggggcggagcctgcagtgagccgagattgcgccactgcactccaacctgggcgacagcgagactccgtccc

SEQ ID NO: 327 - DNA, 1742 bp, Homo sapiens
tgagagtctatgggactcagaaggtggcagatattttttattgtgggaaagataactgagaataaagctatcatgcagatatttgcagagataaaagtaatgcagatattgactggagccttgatcaaactatgcttgaaagccactctaccactagttacacgagccaataatttcccttcgcagtggaagtcagcttgagttttttcaggtgtttctgtgggtttcaccagatccagcaaggaaattagaattactgttaatggatgttaaaaccagtcagaagtatccaaagttatataatttgttaaacaaccatatagatatattttgtattatatttatccttccattcttcctttggtaggaaaattatctcattaattcttatatgaaaggacttaaaattagcaaactttttttgcaaacacatggattccattcttggacttgaggagcatttgacgaacaggctggggaggccttgagtagtctggagccagctcgaagcagagcagagttaatgccactgccactttacacccaattatggcaaaatgctgcccaatgcagttcctggggatacccagaaagaaaaaatggcatctcatgaatttatatatggttaggaacataagccagtctttttatatatgacaacttttgtaggaaaacaagatccatttttttttctgtcatccatgctggattacagggtcgtgccatgatgcccagctaatatttttgtatttttggtagagacagggttttaccatgttggccaggctggtctcgaactcctgatctcaagtaatctgcctaccttggcctcccaaagtgctgggattacaggtaagagccaccactcccagccaagatccatgttttaaacaaattccaatgtggcagaatccagcaaatgtcttattttaagttaagtaagccccgatcagaaagtccattaatgtcaagacctgcaaactgtgtctctattatttttgggcccatcttacaagtaagtggtagtgagttctatcaacatttgattctgcagggtccacgtaacttgaaaaccttccttatatcatgataaggaaaagctacttcttactattatttagaggctgtgcagttgaagccttaggcataagaacaataacctggcatactcagtggattgtgttgtcatttggtaaatcgggtgtctctcataccaaaccaaagggaaacttggacttcagaacaacattgctctctgtaggaacaagagctggaggtgccaatgttgccttgttcctataacaaggtggcattcccaacgcttgtccattgcaagtttaagtgtagtctttgggcctgtcatgaggatggccttcatcaattcacgcccatatgccaaggaccagagttgttctttgtaacattaaccagtccctttgggggctcaaaagggtaccatctgagtgcactggtcacaagagaagacaagtcaggtaaaatgatggggagcaacagcagtgtcagctaactgaaggcctgaagggaagaagcacttgtcaggtaagcactattacacatttccatcaagttcaccagcttgagtctttaccttaatccagctgagaatggtatgaaggcatagggatgcattttttcagaactttccctggagaatctcaaggggttaaagacctgtaatgagagtcaagatcccagtcctaatccctccagcccacccccac

SEQ ID NO: 328 - DNA, 1714 bp, Homo sapiens
agcagaccctgttttaaaaaatacatacgtgggaatttttttggtttattacatgtggaagaaatataaactactatcttttttgtcttcttgctgacagcatggctttggggaataaatatttgaaaataatcctaatacctttgttagttatagtctgtcattctaaataatgtatttcatccctttagcaaacttgaaacacaggcaagtgtaagaaattaaaagataagaaataaaattgggaaaaaaaagtgtttttcttactgctaatactacagagctcatatggtacatgtccgttccctcttggacagaggcctgctttgttcatttccttccatgctgcttgtccagtctttcgactaaaatgatgatttcctgtggtaattttctgttgtctacagagcatactgatgtgtagatcctgcaagtatttctgtaaagcaggtcaacctttgctctaactaaccatcgtgacttattgatttatattctaattgtagaatacaaagaaatatttaaacaacacaaatacttttatcatggatcagtatatcctatggaatgattttgcagaatgaaaactatcatattcttgggagcaaatgtgtatctcttaattttttacttagaataataccttaactaacactgaagtgaacttagagttaatactcactatccaaatttaataaaaacaagtagaagctgtctttgatcttagataaacagaatgtctaaaatgaaaaagagaatctaaaatgagaaaaaaaccctgcacatctcacgtagttttatgaacagattcacagttccatgttcaatgagttaatctttttagtatctaagacccagagacattaggaaggcatgtcagtgttagtgaggtactgaggttacctttagatttcggaagaataaatttgggctgttgtaagtcattcttgtggtgttgcctctgggtgaagatgattgcataggaaggatcgtctatttgtgtagcacacagaaatgcctcactggaaccttagaggagccttgtgaggtacttgtcagtactcctgagtttagaaaactccccctatgctaaagggcccagagactcacctgttgccactgagaagtgctctcggacctgcactagaatgggttgttccagaaagagcctctaaagattggttcataaatattatccaattttgtaagaatctaaatttggttcttagagaggcaccagaaacagaatggaagtcttactcaagttcggaaggggccaatgggttttcaagctagccttcatagttctacagtaactaacactgggttttagtaatagagaaagaatattttaggtattttctctgttcacagctgttcttactcattttactggtttccatggtttctggatttatcatagctttaaaaattagttgttaggccaggtgtggtggctcacgtctgtaatcccagcactttgggaggctgaggtgggtggatcacctgaggtcaggagttcgagaccagcctggccaacatggcaaaaccccatctctactaaaatacaaaaattagctgggcacgatggcaggcgcctgtaatcccagctacttgggaggctgaggcaggagaatcacttgacctgggaggtagaggttgcagtgagccgagatcacgctgttgcactccagcctgggcaacagagcatccc

SEQ ID NO: 329 - DNA, 1248 bp, Homo sapiens
  misc_feature 390: n=a,c,g, or t
tagtaacttaatggaacgggagcttattcagtaaaagtgaaagcagaaattgtagatgatatatcaaaggtatttatgtaagataaggcagaacttagagtccttgttttcatctaaatccaaagacaaattaatggatatacgtttgtgttttatgtttaaataaaatggttttgtttttgttttttaaatacagatggggtctcattatgttgcccaacctggtctcaaactcttgggctcaagagatccgtctgccttggcctccccaaatgctgggataacaggtgtgagccactgcatccaggctaaataaaatgtttagactgtaaatgtattctttcttgtgatttcctactttaactaatttttttcacccttcaactgaancagtactcatagtgtcaaataagagagctctggagctccttatttcaatgatctctaatgggactcagtctaagaaaggaggggcatcagattttctgctgcacgaggctgttctgaagtcattattctagggtttgaagatacttacttttctggcccttacttgactcctctggccatagctccaaactgtctagccagattaccagggttggcttcagatgaacactttagtattttgatgctaaataccagtgataacctataaatatttctcaacctatgatgtgtgttttgttttaataaatccactgtaagttggaaatactgtaagttgacaatgcatttaatatgcctaacctactgcactcagcctgtctcaaaaaaaaaaaaaaaaaaaaaaaaaggaaaacaactagttgagaaggagaactgaaacattgttttgcaaaagtgttgctgtgaacaatgggcgctcatgtcctctatggtgcagattccccttgattcatagagtgctttatctttgtaactagctatattttttctatagtaataccaccattaaaggaattaaagtgacattaagaatgaagaatgttttaaatcttttaaagtcttgtgcattctagattcagtaaaattccagtagtaacaagattttgaagcaactgcagaaactctgcacagccccacgtgtaatgtggctttagaatatgtgtttcttcgcctgtagtctcagctactccagaggctaagacaggagaattgcttgaacctgggaggtggaggctgtagtgagctgagattgcgccactgcactccagcgtgggtgagacagagtgagactccgtcccc

SEQ ID NO: 330 - DNA, 1451 bp, Homo sapiens
ggcctacggaagctgggtcttcttgctgtgaggtcgcgttccccagtgttacggagggtccttgaggcaggagtgaaaattgggtctgggggttagtcctggggtggaggtctgggcacgccgggtcggaccccctccatcttcggttttgcacaccccgctttccagcgcggagtcgcggcgggtagggcggcgtcgcgtgcgtgacgtcatccagcggcgcctcgcaaggctccagtggccttgacctcccgcggcgtgggaggctgcgcggcgatgctgcagttcgtccgggccggggcgcgggcctggcttcggcctaccggcagccagggcctgagttccctggcggaagaggcagcgcgtgcgaccgagaacccggagcaggtggcgagcgagggtctcccggagcccgtgctgcgcaaagtcgagctcccggtacccactcatcgacgcccagtgcaggcctgggtcgagtccttgcggggcttcgagcaggagcgcgtgggcctggccgacctgcaccccgatgttttcgccaccgcgcccaggctggacatactgcaccaggttgctatgtggcagaagaacttcaagagaattagctatgccaagaccaagacgagagccgaggtgcggggcggtggccggaagccttggccgcagaaaggcactgggcgggcccggcatggcagcatccgctctccgctctggcgaggaggaggtgttgcccatggcccccggggccccacaagttactactacatgctgcccatgaaggtgcgggcgctgggtctcaaagtggcactgaccgtcaagctggcccaggacgacctgcacatcatggactccctagagctgcccaccggagacccacagtacctgacagagctggcgcactaccgccgctggggggactccgtactcctcgtggacttaacacacgaggagatgccacagagcatcgtggaggccacctctaggcttaagaccttcaacttgatcccggctgttggcctaaatgtgcacagcatgctcaagcaccagacgctggtcctgacgctgcccaccgtcgccttcctggaggacaagctgctctggcaggactcacgttacagacccctctaccccttcagcctgccctacagcgacttcccccgacccctaccccacgctacccagggcccagcggccaccccgtaccactgttgatgtgaagcacctcttgtgagccaggccgagcccatggccgaattgggagcctcaggcccatgtccacccttcgaggaaggtgtcacctggaccccttcattccacggaggaagctgaggccacagggagcggccatcgccattgggaaggggcgactccacggaaagcccagacgggcttctgcatccattccctctttttgtttttaaaataaattgtatttttgaatcaaggaggat

SEQ ID NO: 331 - DNA, 3685 bp, Homo sapiens
  misc_feature 3648: n=a,c,g, or t
gtgaaatagcaaatgcagggtccctttcacataaccattttgctgttctttcagaaaaatctaaacaaaccaagacattcacaggaggttttccttccttcggcaccagagaggtggttatttgtttcccactaggcacaagagagaagaaaaacacaacagaaaacaatattaagatcatactagagatggggctagaatggcttttgctgttaggaaaaatgggaacatcttagagactctatggtgctatcttactaaattacccagaagtaaagaaaagggagggttttaaaataaataaatacataaacagggtttttgttttcattttcagaaatatctctaaaagcaaatagttttacagcgatatcattatatgtgttaaacttccagctctctgagtatgacttctgcatttttatttttatttttagattcagttttgttcacttgggcatgtgtatggcttggagacaggcaggaatgccaaaaagctggtagatgatggcaactgtgatgagcagaagaactcactgcctcagttacctggatgtgggccattttctttccctggagttggagggcgggcaacaatgttgaaactggctggaagttgagagagaaactgaatttgtttcagggcctagtgatattttagtgcataattttataaaataacagctccattccatgaatataggagaggaaaaagattattgagaaaataatttttttacaggcactggtacttttttttcatgttttgtgttgtagttgcattttactagagcagctgacaccattctatgtggtctgattttgtagttcaaagaccaaaaccaaataaaaagatctactctttaaaaactctcttttccaatgagaggattatggaaaaagtgacagtgattgaaagtctgtgttctatttgccagagtgggggagggagtggtaaggcaggttgactgggatagaccagtcacgaaggagctggaacattcacccaggcccattgccatgtgaattgtagaaggtctgtggggaagacaccatctgccactgtttggcaggatttggccaccatggcacagagtgggcaattgtcctcaaccttggaggcagaagctggcagctggccaaaagtctgctttctcccagaagagataggcagtcactgagccgagatactgatgatgtctctctcttatcgtgcaacatggagagcgggagaaaatgagggaggacagaagagaggagaaggaggaggaaaataagaaaaggaatactaattaactcagcctgtctatccagctaagcttgagcttgattttgctctctagttgaatggaacatgcaacctgaatttctgaataacagaattaccaaattactgtttaagtgtttgagaaaaaaaggtgaaaagtgtgtgtactatatgtatagacgtatagattgacatatagtgaattggttaattgaatgtctgcatcagataagaaggtgttaggtcaatttccacaataatgccattaaaatcggttctttgattaaatccaattaacagatgtggaaactgaggtttgtgacaaggttcaatccctgatttctgtgactccaaagtatgtgctgttatttaatgtttatgtattctctattatgaattgttttcaagttttttaaaatatcactagctagcctgtacgtttcttaggaggcaaaaacaattgccttaaattttgttatattttagtgccattttgcacataggttataagcaacagataatttctgtaatctttagaatatcgattaaacttgttaaaatgtagatattttgaaatctcacacaggacacctaaattatgtaaaatgttataaactttatgatttacaggggccctggagatggaagttctgaaaaaatgttgcctttattcagtattagtgcattatcagggattccagatctcagttaaaatgagagaatctgaatctctaggcaatgatgagtgtttctgaaattcagattcaccagaaagaaattgaaagcaaagagaagacagtgttgtcaaattatcatataattcagctaaaaaaaaaaatcatggtacttaagtgggagctagagcacatcactgcctttaagaagatatttaggggaataaaagaggtctgggacctcggaggtgaaactgagagaaagacaaagggacttcaaatcaagcatttgaaagagccaatgaggggccagatgtggtgactcactcctgtaatcccagcactttaagacgccaaggcgggatcccatcacaaaaaaaaaaaaaaaaaaaaaaaaaaaaaagctgttcctcgtgccatcctggtggatctagaacctgggaccatggactctgttcgctcaggtccttttggccagatctttagaccagacaactttgtatttggtcagtctggggcaggtaacaactgggccaaaggccactacacagagggcgccgagctggttgattctgtcctggatgtggtacggaaggaggcagagagctgtgactgcctgcagggtttccagttgacccactcactgggcgggggcacaggctctggaatgggcactctccttatcagcaagatccgagaagaataccctgatcgcatcatgaataccttcagtgtggtgccttcacccaaagtgtctgacaccgtggtcgagccctacaatgccaccctctccgtccatcagttggtagagaatactgatgagacctattgcattgacaacgaggccctctatgatatctgcttccgcactctgaagctgaccacaccaacctacggggatctgaaccaccttgtctcagccaccatgagtggtgtcactacctgcctccgtttccctggccagctcaatgctgacctccgcaagttggcagtcaacatggtccccttcccacgtctccatttctttatgcctggctttgcccctctcaccagccgtggaagccagcagtatcgagctctcacagtgccggaactcacccagcaggtcttcgatgccaagaacatgatggctgcctgtgacccccgccacggccgatacctcaccgtggctgctgtcttccgtggtcggatgtccatgaaggaggtcgatgagcagatgcttaacgtgcagaacaagaacagcagctactttgtggaatggatccccaacaatgtcaagacagccgtctgtgacatcccacctcgtggcctcaagatggcagtcaccttcattggcaatagcacagccatccaggagctcttcaagcgcatctcggagcagttcactgccatgttccgccggaaggccttcctccactggtacacaggcgagggcatggacgagatggagttcaccgaggctgagagcaacatgaacgacctcgtctctgagtatcagcagtaccaggatgccaccgcagaagaggaggaggatttcggtgaggaggccgaagaggaggcctaaggcagagcccccatcacctcaggcttctcagttcccttagccgtcttactcaactgcccctttcctctccctcagaatttgtgtttgctgcctctatcttgttttttgttttttcttctggggggggtctagaacagtgcctngcacatagtaggcgctcaataaatacttgtttgttgc

SEQ ID NO: 332 - DNA, 1574 bp, Homo sapiens
gcattctggattttcagattatgtatatgtactacaggttgaatatccctactatttttgcaacttcctatgagtctaattatttaagaagaataaaagttttagccaggtgtagtgatgtgattctgtaatcccagttacttgggagactgaggcaagaggatcactgcttgagcccaggagtttaaggccagcctgggcaacatagcaagaccttgtctcccaaaagaaaaaaaaaaaggattttttttaaaaagcttatatattatacagtggtaagttttattaaggtatacatattttgaatcttatcccaaaagttactgaaatttgaaaaatgaagtttgtattattttttcatttttatgcatactttcattttaagcaatttatattatagaaatttaattttgtatttttagtatttctacaatgtgttgtcatgggtctaatatatttagagcccattcccccaactaatcagcagaactgataatggaactgctcttattgaagttgctgtagtctgtcctgtagtgaccttcaggctttaaccctccagctttagttaaattaagcaggcacagacctttgctatggaaacgatacagaaacataacaaacaacttggcttactttcttctgcgaagcagagggtggactgaagagattactgatactggtgaaagtttttagagactagtgttaacagtagtagtaatttatttattgcctacaacataaatgcttctctggaaatcagatgggataatagtctaattagtttatttgatcttcctttaaaagtctctcagatagaaaggcatagccctatttttcttatggtattatacatctggaacagatgttggtcaaaatatgtgttatgaaatatattccctttgaaatcttatatgagtgattaccttcccccaacatcagtttattttatcaaagtataaaaagcaagtggcttatgactttgtgaagctcttatacatgtcagccatctaatatgactaggattctttggtatagagtacttgccagtatgttatttgatatctggataacttaataggtaatagcaaacttttttatttatattctctattttagatttaactacctcattttgacgagctactttaatgcctataatttttttgttggttttttctttttctatataagagcaaattgcctacagttcttttagaaataatgtattgactaacttcatgagttattttgcttcaccaaattgtactctgttattctaaaatttattctttcaacaatgattgaatgcctgtaatgtgctaggcgctctgctaggctctggagataacaagatggatactgtcctcttcacagtgctcacaggcaagtggtaaagttgttgctgtttatttctccacttgatgaacagttggtcatgtagaataatttgttaaatttatgattaaacatgaaagagcaacaggtataccaaaaaggaatgactaatcactgaatagatgaatgtgaggaagttgcctaatcattgttagcttcagattatctgtgaactg

SEQ ID NO: 333 - DNA, 1434 bp, Homo sapiens
agatgttgcagtgagcccagatcgcaccattgcagtccagcctgggtgacggggcaagactatgtgtcaaaaaaaaaaaaaagaaaaaaaagaaaagccagagagttaatgccctgggaccagtcctcagccagtgatggatgggaaccaggctataaatccttcaatatctttgagccctggatggaacaactttgaaatgtattccacatcacctcccagaggtccccagtggggtcaaatcctggttgcctggagtggtaagctgctcactgaagccccctgtgtggcctcctgcctttccatgaatcatttcctcactcccctattggtgttccctggaatcatctcctaaataaacaacttgcaatcctgtccctctttgagcatctgcttggggttggggttggggagtgcagaccaaaacatgatctcttttccactccacactagtaagatgagtttctgtcactggcaaacgagttctgactattacctccttctgagatgataattcctaaaatgtatttgggaatttccccacctccaccccactgcctatgtcatcaatatgtagatttcttaaagtttaatggtattctcttatcaacctcaagtttcacaaaacactgcactttcataaggtatccccatgactgacagatcggccgttcaaaagaagagaagtgtcagagatggctctgctagactcacttatttttcaatagaatctgggttaggatggtgtggttgggagatgcttctggaactctgggacccacaagcctgcgtgttgcatggtggagtattaggacaactttaaaacagtggcaggtggaggcttcctccctccttgcagttcatcctccaccacacccaacgtgcttaatagatattaaatgaataatggggctgggcatggtggctcacgcctgtaatcccagcactttgggaggctgaggcaggtagatcacctgaggtcgggagttcaagaccagcctggccatagaggcaggagaagcacttgaacctgggaggcagagtttacagcacgctgagatggcaccactgcactccagcctgggggacagagtgagactcaaaaaataataataataatgatgatggatttattccttccaaactgcaactcaccaaaagaagaccaagacgcatcacaatgttgtggccacaatcaccacagtgacgataatgaatataatctactcttgagccagccacctccactaaacccagcggatcgcatctggtgtttcacttcggggatgttttagtggtcgtggtagatggttgcctgactgatggctgtttctactgtgtttcaggaatatagagatgtatacggatgacctctaaattaattagtgtgcaattctcaaagagccaaactctaccccaaaagctactggaatg

SEQ ID NO: 334 - DNA, 2300 bp, Homo sapiens
ggaggaaaggggaaaccggaggaagggcctcgggcatgggtatgctttgagggctgagaggagggacaggagtgatctgactgcactgggtgatagggactcgggggctgggagcaggctgttctcagacgatagaggttcttggccgacacgtttgaacttgttcctgcagaccaggggtccagagaaggtgctgtgtggggaggaacgagaatggagtctggggagacggggcttcccaacaccctgcactgtgttgctggaaggtgcttgtttgtcacctgcctgggacatagatggtgcatgatggatagtgggctggagcctggtctgaggtcagggaggagccggaagtccctggcagtcactgaggttgttggggctcatgcctgtgagtctaggaggaacgtgagcccccgggtgaatggagagagcacacctgtggctgggtgttcttgttgggtgtcgccgacactgtcaatcaccatgtccgccctgcctcctgtggcggctgatctaatcaccatagatctgaattctgaatggagggttggagggaggagagaggatgaaagtgacctgcactgtctaatccgaggagagaaagggtcttctagaataagccgcgtgcctcaagctggcttgtggaatgttcagactcgttcctgggaaggcagtggcgctgggggttccacccctgctgccaggaaggctctgcgtgctggaagccatggtgcatctgcaggcatgcaggcctcacaccccgcggtcagacactggcgcgagcgtgaataccacagcctggtgtcagcctactcgagtaaactgttccatggaagtagagaggactttaaaaaaatagactgtgttcaccattgttccaagttgggatctccagaagcaaacactgggtcagagtttggggtgtaaggcagtttttaggagtgaacgtttgggaaaggaaacaggaggcagtgagattcagagaggaagagatcgaaccatgatgcaggcccagcaaagcccaggctaacccgctggggcgtgtgagctgatgcccagtggagttgcctcatgtcagggatgtggccagggctttagactcctgcctcgctgcccaccagatgtgtctgatttgcccaggaagggcctgactctggccagacagccctctgcaactcaggctgccagaagttctgacacctggccacactgcctgcagctggggagcacgtccttctggcaaggcggattccagggcgcgtgtaaatctccaccaccagcgccgtgactatgctgagtcccaggcgggtgctccctgccacccgcccccacccctgctgcacattccttcccagtaaaaacgcacaccctcaggacagagcagtatcttctaaagggcttgcccttcacttggttctacccagagatagaaccattctaagcagtaactcacatgtatggatttcttctggcagatctgcatgagctctcagtgatggtggggaaggcggggacggcaaaactgccatcgcatttccgaggtgtggcccgcctccctcaagctcccgcacggtttccccagggggtcctcatgcccctgcccctggcctggttttggttcacctgtttcacctgtttcccctgacgcctgctccacgcttgggctttctgctttttatcttttctttattcttaatggttgacttattttctttactctcttgtgtttttcaagttttaattaatgagactatattactttagtagtggaacacaggttgtctaacattttattgtgcacatttttaaacatacagcaatgtttaaagaggtttacggtgaaaacctgtctgctgttaacacttacgtatgcctgtgtcctcaccacctgtcacctctctctctatctgtccatcaatacacccatcctcaatttatctgttttttttttttttgctacatttcaaaataaatttcagatggcaatgcatttcccactccatatgtcagcatgcatgtcattataactagagtccaatactagcttactgttttattcctttgaagcaaaatttgtagtgtgaaacgcacaagtactaacagcacctttgctgagtgtggacaaatatggacattgtgtgtaactcaaatccctgccacagtagaggacatcaccagcctccagaaagctcaccatgcctcttcccaggcagtgcttgaccccacctctccaaacatatccactatttttatttcttccaccataatgtaacttacctgtttagaattttatatcc

SEQ ID NO: 335 - DNA, 1963 bp, Homo sapiens
ctgtccccttctttataactctcagcatctggttcttcctttgggattctgtgtggctttgttcttgtcctttaggtttgttcattaatgccagtttgccctgtccctccttacagcttgcacatctgtaatggtctagttctgtgggattttgcagatagttgtatattttggccaaggtatcagtgatacggttacctttgggcagggataactgctattcggttggcatgatattttttccttctataatgtataccttagtgattgttttaaagtgctgaatttatcccttatgtatattacaaccatgaagaatataaatcagaagtcctccatttgggcagcttcttatattaacacttatattaagaccctcttactgtctcctcttcccagaattagagagttgatgtagtgcttaatagacatggcttattgtatgctaggtgaacttggcaattccatagctatgttaccctcacagaaagttatttcctggagagattattaagtgttctgatctttcatatatgcctgagagatctaagattcttccacaaagaccctatttcttcagagaaaactatagtgatgccagagtcttttttttttttttttaacaacttgtgatttttgtgcacctgtgttgtatgtgttgccattatctcactttagggacgttggataaactggcgtatttgtgcagcctcatttaagtagtggcaaccattaatgacttgtacccacaagtttttccagataatttctgttttttccacctttcttacatgttcttttttagtcataggtacttggcttactcaagggaggtgtagcgtaagataaagataatggagggtgttccctgtagaataggtacaaatgctgcaggctttatcttgggcagagcaagtagggttttggtcctgagtaagtgagtgaggttaggtggagctgcctgtcttccagccgtgcggatacaactgactcagtccgtgttctcaacagtttttgaaaagcccatttttctatcccacttactcccacctgcagttctttaagaacgtagtttccaggatgtcaggcaactccccactcctccatttcctgtttgtggtcttcattgagagacgccttaaacaggaattcctggggaagtgcaggctatagcggtgggattccgggggtcattagtccattattgaagctggggaatcatgtactataaaaggacctcccttccgttctgttgtctcctagaaactattactgatcataaccaagcagtaactgcaactcagggctgttgacttgtgccctttgtctttagagactgaaaattattttcccttcttgtgcctcagtttctattagttgaattttagagctcaacatcaagatttgtgacaaaattaacttggactctgtaggactgattcgtttgaaatgcaaaagtagtgaagaacataaaacagactccctatcttggccgccagggggtgccctttcccttcgctttactgtctggcactccccaccgcattcagccattttagacagattgtttttgctcccagctaactccattttgtatttgtgacgcaggaataaaaaaaggagttaggcaaaggaggagtctggtttgcagagggagggagactggctgaggcgcagctacgtactcttttactcagcagttgctcatcagggacacaccttgctgcaggctgcctgcatcctgagcaatcgatgccgcaagtccttgccagcggagcacagagcaaaatggtttggctgccggacacctactaacagtgacagagtgctagcttttgaggcagcaggccagggcatcccctctgcctcatctagactctaatcctgggtttaggtgtttttgctacagagatgtttagggcagttttcttaattataggatcagataagaaaagataccccc

SEQ ID NO: 336 - DNA, 1514 bp, Homo sapiens
gcttgtctttgctttggtttttgatgtttttcattgtaccaaaattcttaattttaatgcagccaaacattttattcttttcccttatattttatatgtattgtaactcatttgagaagtctttcttttttccaaggtcatgaactgttcatctatattttgtctaaagatttttaaatattgtttttctatatttagctattcattctgtttggaatttatttttatatatgatgtgaggtagggatctaattttctgtgtacctgcatagtcatttttcccagcactattcagtgactcttgtcctaattaatcaatgccaccaatacaatcatctctccagtttccttatattcatgggtctgctttgtagctatcttttctttcactaatgtatttctctgtcactgccccaagtgcctctgtcttcatgattacagccttataacaattcctgacatctagtaggccagattccttccaaaaaacctcccacatcattgttttaacaaaacccttttgggatttttcttattgagttgcattgagtttatagaaatttggaaagagataatttctttaaaaatattaagtctttccatctttgaacataacgtgggttgagcatcccaaaacttgaaatgctccaaaattcaaaactttttgagcactgacgtgatgctcaaaggaaatgtttattggagtgttttgcatctccgagttttggatttgggatgctcacttggtgagtataatgcaggtattccaaaatctaaaaacaaaatttgaaacacatctggtccaagcatactcaacctgtacatctctacacttatttttcttctttaatattgttccatgaatttataattttttacataaatatcgtgcatatattttgttagatttatttctacctgtgttgtggactgtgttgctattataaatgtattttctcaaaaagtttgtcttgtaattgtttttagttgacgtgtatgactgggattgattgtatgtcttaatcttttattcaacaatctttttcagcctttttttataagtttataaaaaatgacagcaaattttattttttaaaacaaccccatcggtcctgcccttttccctcacaggagtataatagccatgaatgtagggatcttgtgtttctcattcagttcctcaggaggtattttttggatgaaatacttaataaaatctccaatttggggctgaagaaacagtgcccactcactgtatcagagtggttttattaatacgtaactgctctctttgctgaaaaagggcttatttttttcacctggcagcctggtctcccacactcaacctgactacagattcccaaaatagctgggctcctccatgctgccaggactttgttcccttgtgtcttctaagccaggcaaacgtgtctgtccccttcagagactcgccttggtctcagctcttccaggaagctttcttggatttccccatacttcagacagatgtgtcc

SEQ ID NO: 337 - DNA, 1322 bp, Homo sapiens
  misc_feature 235,558: n=a,c,g, or t
gaatcaaactcgattcaaaaccttcattcccagtttctaatgcagggatgtaacagatgttcttacatttagactgttatcttgatgggtggcacgtcattatcgtcgactgctgatgaggtgcagatgaatgctgctgggagccatgtgtgatagtggaggaagttctaattggagtgctctcagtacagaaaatttaagaatttatcaatgttttaggagatagcatattttnggaaagtcagtgtgtctgcaagctgctgaaagatgttcttgtagacttgttgaagaattatgaactgcaggatgccagtttttgaaatcccaattcctttggtaataagtataaaaatagccactataaattgagccccaggtactgttaaactaacttaattctcataagaaccccataaggtagtcaatgtcaatatctctttttagcattttgggcaaagtagatccagagtgattacccagagtgattgattattgactgtaggtggaagagcccattatctaccgttagctttggtagtcttaaccgctatggcgcantgcctctgcagtttggatggctcatacaaaaatccacttgaggactgggtgatactttttttggtaagacaggttttctttcatctaatgaggtatgttttggagtctttatgtgaaacattttcttctaaaccatgattattaagggcaggagctacgtctgtgtgttcaccattttatcatcaggctttcagtggtgtataataaatatttgttgattggacttggattcttgagcgggggcatccagttggtatggttagggaacttttaagagaaacatttcgtttatgcaaacaactcttaaaggatgtatctttcaaacatttctttggtgctggtcaggtcacttactactgggctaataggagtggtggtttcctccttgttaaagttgtctgttacctgagagtatttgggactgatagagaagctggtggtgggggtgttatttgcagagaaagcagctggcactaagtttacaggctaattagaaatggtcacgcctctaatcccagcactgtgagaggctgagtttttcagattacttgaggtcaggagttcaagaccagtctggtcaacatggcaaaaccccgtctctactaaaaatgcaaaaatcagctgggtgtagtggtgcgtgcctgtaatcccagcttctgggagttgaggcgaaagaattgcttgaacctggaaggtggaggctgcagtgagccaagattgtgccactttactccagcccgggcaacagagcaagactctgtgtc

SEQ ID NO: 338 - DNA, 1857 bp, Homo sapiens
  misc_feature 1409,1698,1699,1700,1808: n=a,c,g, or t
gtcagtcagaaagaaaagaccttcagaccagaattttctcttcccaacttgctttccataccctgtgggaccctaagacaacagaaaactgagttttgtttcacttttaactgatgtttttcactttcacctgatttgggcccagtttcttcatacatgggaaacagcagctgcattaaagcagcagttctcaccggcgtgttttgccctttagcggacatcgtctggagacatttttggttgccaggatttgctgggtggccttactggcatctagaagaccgacgctgctcaaccctgttggcgcgctgaacccaaatgccagtggcagtgagcttgcaaatcgttggactcatgatgctttgagtgctctcaggactctggaggtcgatgctggggttcctcgctggcttcctgctgctgatgctcttcccctctctgagctcttttacggaaagcttcgtggcacacttgctgcttttcactgaaaccaggctgtgtggtgactagaagctgcgtattcacatttatttttattgattgatggattgaggctgctgtgcagtggtgtgagtagctccggctacaggcgcacgccaccatgcccagctaattttttgaattttttgtagagatggggactcgccgtgttgcccaggctggtctccaacttctgggctcaagcaatccgcctgcctcagcctcctgaagtgctgggattacaggcgtgagccagcgcacccatcacacacttatttttaatggtccttgaggttaatggcagctttgaacaatcctgtccaggagtgtaaggaggaaaaacctcactccatcttccaggagtgtaaggaggaaaaacctcactccatctttgcaaaacgcatgtgccaggagtgttgctcaggaaacacgcgattctctcggatgctaagtgcagagccggggaaccctgcaccagcaagccctgtcctgggagctgccttcaatcctgtctgtgcttccttccctggttctgcacacggaagtgtttggagttggaggagagcctgatgtttggatgggactgaagtaacatgggtatagattttttttcccccatttagactggtttgttttattcttggagtccccagagctcttcagggaaattatatagttttattcagctgccttttttttttttttttaagacgagtttcgctctgtcacccaggctggagtgcggtggtgcagtctcagctcactgcaacctttgcctcgcagattcaagtgattcacctgccccagcctcccgagtggttggggttacaggtacaagccaccacacctggttaattttttgtattttcagtagagacggggttttgccctgttggccaggctggtcttgaactcatgacctcaggtgntccgcccacctcggcctcccaaggtgctgggattacaggcgtgagccaccatgcatggctttattcagctttttaaaaaaatggtactgcagtataattttttcctcttaaaatactcagtggaaatgaaaaccaccttttttttttttgcaccttttatgtagtttaaaacttaatttgcttcttaaagttaaaattagccttttaaggctgggcatggtgctgacgcctgtaatcctaacactttggaaggccgaggtgattggaacacctgaggtcaggaggtccnnntcagccgggggtggttggcgagcgcctgtaatcccatctactcgggaggttgaggtaggagaatcgcttgaacccaggaggggaggtggaggttgcagtgagctgtgntcacgccactgcactccagcctgggggacaagagtgaaactctgtctcc

SEQ ID NO: 339 - DNA, 1290 bp, Homo sapiens
aaattatctaacacaaagctgttttataataaaaatgttaaatatcacatgtaacttaatgactactgaaagtgaaaaccagaatggttgtgcgtgtactcattgcagtttctactgatgcatattacgtgtacaccattgtaacgtcaaaaaatcttaagttaaaccatcgtaagtcagggaacacctgtattacatacctagcaagcatacagttttattcttttctttacatgatctggctgttgtcagatggctgatgtttggtcagtattactagaaacagtatttcttcagaggtgagttaacataagaacaaaaaagcacaagattcaatgcaatatcagtctgggaagtaggggagaatatgtgtgctccacataatctttattggaaatagtgttcttttgtggaattagaagtggatacacatttaggttgaaagtccctaaccagtcacatagtacttgtaggtatttactatgcttcatgctaatggtactctttaaaaatggaaataagatagaggtctaagcaaaaaaaaatttattattattattttttgagacggagtctcactcagtcacccaggctggagtgcagtgacgtgatctcggctcgctgcaacctccgcctcccgggttcaagcgatttttgtgcctcagcctcctgagtagctggaattacaggcgcacgctaccacttccagctaatttttgtattttttgtagagactcactgtgttgctcaggctggtctcgaactcctgaccacaagtgatccaccccgccctggcctcccaaagtgtttagattacaggcgtgagtcacgtcacccgtccctagactgattaatttttatttatttatttatttatttttgagacagagtcttgctctgtcacccaggctggagtgcagtggcgcgatctccgctcactgcaacctctgcctcccaggttcaagagattctcctgcctcagcctctggagtggctgggaatacaggcacgtaccaccgggtttcactgtgttagccatggtagtctggatgtcctgacctcttatccacccaccttggcctcccaaagtgctgagatgacaggtgtgagccaccgcgcccagcaggactgattagttggtgtttttttttttttttttttttgagacggaatctctgttgtcaggctggagtacagtggcgcgatcttggctgactgcaacctctgcctcccgggttcaagtgattccactgcactccagcctgggcaacagagtgagactctatctcc

SEQ ID NO: 340 - DNA, 1925 bp, Homo sapiens
gcctcgactgtgagcgcatggaacagacagactcttcctgtgggaacagcaggcatggtgaaagtaacgtctgacagaagcatgtgcacttcgggaagcaggcctgcatcttacctgtacagtatttgcattccacagatggaacggtttggagaagcactttttcatacttttgtgaaagtatacatgttggcccagtctctcgtatctgtacctttgtccctagtactgtaactgccaatctgtctgtgtaagctggaatctgtggcaactattaccctgtgttgtatttcccaagtgtctggatggatggagaggtactcaaacaagttactttcagttgtcctgctggattttaaaaaaatagaaaaagaatctcaaaactactgttttacatagattgtttgaagagtccttcctcttgtgcttctgtaccactttcccagctcttagatgtggtagctaaaggcacggaatttagacggccttgtaaatagggcatgaggaactcatctgtgtattgggatggtattagagagagaatcacggaaagaccaactcatgaagtgaacttggtttgatcttactcaactagaaagcttgaaaacatccctggggattctgaaggcttaattttgcaaaggaggatgcattgtctgaactttgcaacttcatccagtgcaagtttgatgcaagaatgtattaggacataaaatagaggctgaccttaaaagggccaggacagaagcggctgccagctctgaatctttaactgaaatgcacatggcaccaggaggtgtctctcatagttggttgctagcctaaaacatcagaatagaacccaaagggcttaggaaggcctgccaggataacaagaaggccctgtattcattgtgtttcatctgcctaggcctactcattattttagagaatgaatgaagcaccaaggaagagagaccatgactctatcgatgacactgtttatagaaacacaggagaggaagaatttggaatgaaaagcacttcgtcagaaccttctgtgggagccattgagagaaaagcatggtccagtgccttctgagaaaggccagagctttgggctttcctgctctgcttttgggtcgtcaatttgccatctctggttctgtgctataatcagaattgtaattatgttctccagaggccaatttcattaactctgattaattagaatcagctagccagattagtaacctctttgtccagccttgatttacagtgcagggtaaagtgcagaccttaaaaacagctaagtacctagaagagctccctgcaagtgtaaatattaaggatgacctgtgcaaaattatacccacaccagcactagtgggtaattattctaaattattgccaaaaagttttttttaatctgtctttcaagtttacagaaaagaaagcagtaaatgcattgatgtcattttattatgtacatatatcatgtgcattcaagctgtgtgacaagatatatcaatataaaaacaaggtatatactttattattttttgaaaacaaggatattgtgatcaattttaccctgtaaaacatatttctgtatttataggtcttaaacatgatgatattttttctattacaagtttatttaaaactgctttctcaagtcgttattgatacagcaagtgaacctgctgcagacagaagcagaggaaagccaagaacagcctttactggtgaagaaaagaatgaatgattctttgtaggcgccatcagccacttttagaagccatcagccagtgtgttgggaaaagaggtttgtcaagtgttggcctatgggaaggtggtcaatgaatgttttgatgaaatgaatgtttttgtataatggccttaaacttttctggaagtatttcaaataaattacattattaagc

SEQ ID NO: 341 - DNA, 1106 bp, Homo sapiens
  misc_feature 1070: n=a,c,g, or t
ctcaccagggcttccagtgaagttacaatgccctagtctgtgaattagtctggaaacgtgtttttccttttcggatgttagagtaccctttgataaactaaattttactaagctgaacaactctgacagtctaaagagctaatgtgggttaccaaaaggcctgtacctgtaaaacaaaatgcaggtgtaatgattatacatgtctatggattacctggacatactctcatttgggttgttcttcaaagaagcaagcagccgatccctgttttcataaagctaatacttcagttggaaaaattaaacaggagcacaaagtcagggataggggttagcagaagagagaaatagtgtcacatcaagggcaggatctcatagctagggaacatttcacaaataaggtgagattttgtaaccaataataaaaatgaatgtttttataagtaaataacttatttttcatatggctaaagatggtaaaatgacttcattctatagccattgtaaataagaatttgctattgatgaaagaagttcagattggcatttgaagtattgagtgtatgggatctctaaggatttcttagattttatatttaaatattttttaaaccttagaggagtcaacaaaactggctcttgattttcagcaccctactctcatgaaaaaagcctgaaaggaccctttcccttataagtaatttaatccaatttctccccattttatagatgaggaaactgaggctcagatcagatgagaactcacttaaatccactcaatgtgtagatggtagagctgggactagcaacattgctgcagcccattgttggcctctctcttcactttatcattgcccaagaatgaggatatgcagtaaacagaattcaggcaagatacctctaagctgttttgaaccctctgatattttgtatttatgtgtttgtctgtctccccctactagaatgtaagctccttggggcagggacttcactgtattttgttcatagtgtatccccagagcctggaccagtgcttggcacataggagatggcaataaattcttgtaganttaataaacaaggtgaaggagagatctaatgaaacg

SEQ ID NO: 342 - DNA, 1859 bp, Homo sapiens
  misc_feature 1559,1837: n=a,c,g, or t
agagtgttctagcctgcttatgaagtccagctgtagtgttgttcttatcttctggttctttgttgatcttctagttgttctatcccttattgaaagtggggtactggagtctccaactgacatacttttcttttagctttttattttggaaaatttcaaacatatatgaaagaagagataatgtacttactcatcacccagcttcaacatttatcaacatcttgccaatcttactgaatctatccttccttaccttttttaaaaatgtttcctagagtgtgtcaaagctcatcccagatgtcctaatgtttctagtaaatgcttctgcacaattctaaaagacaaggatgtttttaaacccagccccgacactatcatacctcacaagattcatgctaattcctcagtgtcttctagtcccaagtccatgctcaagtgtccccccctgtccaggcaccctcttcaggggtcctccaatgtttcataagcgagaaggggccctgagagttgggcaccccgggcagagctggctggagggggcgttggaaaggaaggcgggtggccagacgtgtgagggtgcaggtctgcaccagctcctgtttggtctgtgttcaggaacaaatgtggtatactggggctggcggtctgagaagatggaaactgttagcggctaaggagggccaaggtgtgcagtgccaccaacgtggagctggtgacacgcacacgcacagggcacctctctgatcaggacaagtcgaggagcaaagcggggaagactccattccagtccttcctggggatggcgcagcagcattcctcccacaccggggcccccgtgcagcaggcagccagccccaccaaccccacagccatctcccctgaggagtacttcgaccccaacttcagcctggagtcacggaacattggccgcccatcgagatgtccagcaaagtacagaggttcaaggcaacactgtggctgagtgaagagcacccgctctccttgggtgaccaggtgaccccatcatcgacctaatggccatcagcaacgctcactttgccaagctgcgcgacttcatcactctgcgccttccacctggcttccccgtcaaaattgagattccccttttccacgtgctcaatgcccgcatcaccttcagcaacctgtgtggctgtgatgagcccctgagctccgtgtgggtgccggcccccagctctgctgtcgccgcatcagggaaccctttcccgtgcgaggtggaccccaccgtgtttgaagtgcccaacgggtacagcgtgctgggcatggagcgcaacgagcccctccgggacgaggacgatgacctcctgcagttcgccatccagcagagcctgcttgaagcgggcactgaggcggagcaggtgaccgtttgggaagccctgaccaacacccggcccggtgcccgccctcctccccaggccacgttttttgaggaacagcttcagctggagcgggccctcaaggaaagcctgcagttgtccacagagccgaggggcccaggatcccttccaaggaaacccccnccccccggtccacccagttttgaagagcagtgcgcctggccctggattttttttcacgggagcaggaggagcgggggcggcgcgggcagcaggaggaggaggacttacagcggatcctgcagctgtcactcactgagcactgagccatagccccgggagggctggccaggccactccctgcccgcttttgtaatttatttatttataaactctctgctgctgagcttggggcctggagccccaggaatgagcaggcaggggagactgagatggaaatnaagagactgtcgcaaaaaaaag

SEQ ID NO: 343 - DNA, 1009 bp, Homo sapiens
gctttctaaagagaaactgaccactcaaaagatgatggaagagctggaaaagaaagaaagaaatgtacagagattaacaaaagcattgcttgaagtgagtagaagaaattcaattttgctttgaaaggatgattcactataaaatgcttattttatagatattaatagagcattttcagattaaagacatgattttgatatgcctgttaattaattccattgtttcttaccaaaattattataaaaagacaaacctttatttattttgtgttttagaatacagtttcacataattatagtacagtatatatttattatatttattagctggcattcatctataaaaaagtttttttcccatcaccccaggctattgagttattctgaaatacagttccaattggaaagctaattaaagttacctttaattagcagttttcaagataagaaggtagcagttttggggatcagcaattcagagttgttggttttttctttttttcttcttctttgattttatacttgttatttctttgtctctcgcaccgaagtttgtggttcctatcaacattaacatagatgcttccccccaccaatatgcaaaaagtagtttcaaagtaattaaaccactattgctactaacaataaaaaccacagagtgaggttcaaagttactttttagttctttttatccttggaataaatctcattatagaaaaatacaggctgggtatggtggctcacacctgtaatcctaatactttgttttgggaacctgaggtgggcagatcacttcaccccaggagtttgagaccagcttaggcaatgtgacaaaaccctctctctacaaaaaatgcaaaaattagccaggcatcatggtgtttacctgtggtcccagatattcggggggctggggtggggggatccccggagcccgaggaggtcaaggctgcagtagtgagtcatgattgcgccactgtactccagcctgggtgacagattgaggccc

SEQ ID NO: 344 - DNA, 1445 bp, Homo sapiens
  misc_feature 1217,1218,1408: n=a,c,g, or t
tgctttgtttccgtgagagcaacatgcgttaaattgtaaagctaaattttaaaagtgcaaaaaagtaccaataagaccttattccactattttttcatggacctccaaagttaaatgttatggaatattctctcctgccagcctttgacattagttttttctttcctgagaggtagtagaggtgctttctgcctccttatctttcatcatagagtggcgaaacattggggatatgatttatctggtgccttttcccatctcccttgagtgtttttgtggatcccttgccaccatatgcttattcagtgctgccttgtgtttatcgccatcatgaatagagtagttgttacatcattcatgataattattcttcaaaggttaatcatggatagcttagtcactcttaaatttattagaatcatactatgacttgaggctgactgagctggagagattgaatatttacacattgaaaggtaataatgctccaaaataaaaaagcaactgacaaaggactttttgttttgtttatctgcagtgtatttcttattctcagtcctctgtttatgaccagtgatttggcttcaaggatgtttatttagtacttaatttagttagaaggaagatacggagatatggttcctgccttccagtaacttgttatccaatgtgaaaactagaatgtttatgtaagtagcagcctaactacggagaacccattgagcagagtgtgtgtgcatatgtaggtggtggtgctggcagtaaggaacggtgatggctgtgactagaaagacttaattcatgggtcactgaagatccgcctttgactatttactccgaaatactctgggttgggaatatctaggtaggatgctgtgtgaaagaatacacatagtgcagagtggctgatgtagcctaacttatatttggtgggttccatagaagctgtgagttccacttcccttgggataaggaagtaaaacttcagatgacccttcaagactggctaggattttgctagtagaataagagaatggagggtattccacatgaggatagtataaaagcaaaggtagtatgaaagtactaggcctgtttggaagtagtagtttgatttgtctagagtagtatgctctatgtgagcatggtgggaaataagaagtggaaaactgatgatagtttatggaaagccttaaatactagcccaaagcatccanncccagtagctcacgcctgtaatcccagcactttgggaggccgaggcgggcagatcagctgaggtcaggagttcacgatcagcctggcttggtggctcgcacctgtattcccagctacttgagaggctgaggcaggagaaccacttgaacctgggagacggaggttgcagtgagccaagatcacaccactncgactctagcctgggtgacagagcaaaactgcatccc

SEQ ID NO: 345 - DNA, 1682 bp, Homo sapiens
agcacgcaggtaagacgctatccaccaagccctttccttccttctttcccgggatccctggatctacggctgtcttctaatggagagttcctatgaaacccttgatcctgtgacctgacctcatgtctgtagacccttcaaatgaagacccttcgaaccctgtgactcttcctgattcctttgacccttattcatagatccccggatccagggctaccctctgatggggtcccccttgctaatgacctccattctcctgacctacgtgtacttcgttctctcacttgggcctcgcatcatggctaatcggaagcccttccagctccgtggcttcatgattgtctacaacttctcactggtggcactctccctctacattgtctatgaggtgggcccctgggatgccgggctttaatttctgtcagcaggataaggagcaggccatagagccagagcatggcatttctcctttccagagaggttcagatccatgtcctcagctagcgaaggggagggatggctgggaagggagaactctggtggtctaatccacatcccttcccagttcctgatgtcgggctggctgagcacctatacctggcgctgtgaccctgtggactattccaacagccctgaggcacttaggatggttcgggtggcctggctcttcctcttctccaagttcattgagctgatggacacagtgatctttattctccgaaagaaagacgggcaggtgaccttcctacatgtcttccatcactctgtgcttccctggagctggtggtggggggtaaagattgccccgggaggaatgggctctttccatgccatgataaactcttccgtgcatgtcataatgtacctgtactacggattatctgcctttggccctgtggcacaaccctacctttggtggaaaaagcacatgacagccattcagctgatccagtttgtcctggtctcactgcacatctcccagtactactttatgtccagctgtaactaccagtacccagtcattattcacctcatctggatgtatggcaccatcttcttcatgctgttctccaacttctggtatcactcttataccaagggcaagcggctgccccgtgcacttcagcaaaatggagctccaggtattgccaaggtcaaggccaactgagaagcatggcctagataggcgcccacctaagtgcctcaggactgcaccttagggcagtgtccgtcagtgccctctccacctacacctgtgaccaaggcttatgtggtcaggactgagcaggggactggccctcccctccccacagctgctctacagggaccacggctttggttcctcacccacttcccccgggcagctccagggatgtggcctcattgctgtctgccactccagagctgggggctaaaagggctgtacagttatttccccctccctgccttaaaacttgggagaggagcactcagggctggccccacaaagggtctcgtggcctttttcctcacacagaagaggtcagcaataatgtcactgtggacccagtctcactcctccaccccacacactgaagcagtagcttctgggccaaaggtcagggtgggcgggggcctgggaatacagcctgtggaggctgcttactcaacttgtgtcttaattaaaagtgacagaggaaacc

SEQ ID NO: 346 - DNA, 1164 bp, Homo sapiens
  misc_feature 828: n=a,c,g, or t
gccctgcaagaagcctcaagcctgagcgtgcagcaggggcccaacttgctgcaggtgaggcagggcagtcaggcgaccctggtctgccaggtggaccaggccacagcctgggaacggctccgtgttaagtggacaaaggatggggccatcctgtgtcaaccgtacatcaccaacggcagcctcagcctgggggtctgcgggccccagggacggctctcctggcaggcacccagccatctcaccctgcagctggaccctgtgagcctcaaccacagcggggcgtacgtgtgctgggcggccgtagagattcctgagttggaggaggctgagggcaacataacaaggctctttgtggacccagatgaccccacacagaacagaaaccggatcgcaagcttcccaggattcctcttcgtgctgctgggggtgggaagcatgggtgtggctgcgatcgtgtggggtgcctggttctggggccgccgcagctgccagcaaagggactcaggaaatgcattctacagcaacgtcctataccggccccgggggcccccaaagaagagtgaggactgctctggagaggggaaggaccagaggggccagagcatttattcaacctccttcccgcaaccggccccccgccagccgcacctggcgtcaagaccctgccccagcccgagaccctgccccagccccaggcccggccaccccgtctctatggtcagggtctctcctagaccaagccccacccagcagccgaggccaaaagggttccccaaagtgggagaggagtgagagatcccaggagacctcaacaggcccccccccatnggtacacacaaaaaaggggggatcgaggccagacacggtgctcacgcctgtaatcccagcagtttgggaagccgaggcgggtggaacacttgaggtcaggggtttgagaccagcctggcttgaacctgggaggcggaggttgcagtgagccgagattgcgccactgcactccagcctgggcgacagagtgagactccgtctcaaaaaaaaacaaaaagcaggaggatttgggagcctgtcagccccatcctgagaccccgtcctcatttctgtaatgttggatctcgctcccactttcccccaaagaacctaataaaaggcttgtgaagaaaaagc

SEQ ID NO: 347 - DNA, 2160 bp, Homo sapiens
ctaaagagccaggaattactgcagagtaaaaatgaagagctgttaaaagtgattgaaaatcagaaagatgaaaacaaaaaatttagtagtatatttaaagacaaagatcaaactatacttgaaaataaacagcaatatgatattgagataacaagaataaaaattgaattggaggaagccctagtcaatgtgaaaagctcccagtttaagttagaaactgctgaaaaggaaaaccagatattggggataacattacgtcagcgtgatgctgaggtgactcgactaagagaattaaccaggtaaaattgacttcctttgaataactcatgccttttttatttttagatgtttttataaacttcaaaataatgttagacctgttttctcccccatatctttttctcttattttgccaatgtttttgctaatttctaatgatgttttcttctgttccaattaaattagtttaggaatttcaaacctggcgaaatgtttttttaaaaccatgtgattctgggcagggggtcctgatgagaagctgaagacttgtatagcaacaccattgagccctctggttctgaagctagagagatctgactggaatcccagctctgccacatattagctgagtaactttgagcaagccatttaacttctctaaacctcagctgtaaagtagggacatgaatagagttgtcatgggaaactaagaaatcattcatgaaaagcacttaacatggtaagccctcatgccatatgatcttgggtaagtcagcctctttcagcattatttcatcagttaaatgagtgagttggcagtaccccttgagatcacttcattccctaacagtatttttctaaaataaaattacctcactcaatttttctatgatattcacttacaaaattcagttttcttttgagatatttgctaagaattggattctcaactgctttttaaagttctaggcgagaagtcagttatctgaggcctaaagatctgcagatctgactttgtcttcgaatgatcctagaagttccaaatataaaataatcttgaatataaaataatcttccttgtgtttccaatgaacagatcgattttgaattttcaacttcccccctcattttgaatgataaacttgtagggaagcaaatgaaacagtaatatataacatttaatttattaatttagttttataaatgtatttgaaattaatgatctgttcacatggaaatattgccctttttccacatttatatttcataggatatttgcattcaaacttttatttaacaatggcaaaagcaagacattttttgtaatcatataattataattgattaggttctagtcagaggttctgaatattggcttataccagtcttattcaaaataaagtaatagaatgtcccttcttatggaagtctttgtaaggtatcccaaggaatgtttccttttttctaaggaataattttgtggtgagaattttgttagtgtcaagtatttatactaagagaaaccagtaacaaaaggccacatatggtgtgattccatttatacgaaatgtccagaataggcagattcacagagacacaaagtagattagtagttgccaggggctggaggaacccaggggtgtagaatgggaaatgactgctaatgggtagtttcatttaggagtgatgcagatgttctgaaattagatagtggtgacagttctcaactctatgaatatactaataaccaccaaattttgcacttaaaaggagtagattttgtggtatgtaaattatatgttggttgcagggcctcatgcctgtaaccccagcactttgggaggccgaggtgggtggatcgcctgggcctaggagctcgagaccagcctgggcaacacggcaaaaccctgtctctacaaaaaataccaaagttagctgtgcgtggtcgtgcatgcctgtggtcccagctactgcgagaggcagaagtgggaggagcccaggaggtggaagctgcggtgagccactatcatgccactgcattccaacgtgggcgacagagtaagaccctgtctcaaaaaaataataaataaatatattaaaataatatctcaataaactgttattttgtaaaagttatatatggtatacagtctgtttagt

SEQ ID NO: 348 - DNA, 1663 bp, Homo sapiens
ataactaaaaacagtaataaagttatttatctaccaggataaaaaaattctcaagtgtgtattaaagataaaacaaaaacaaaaacaaaaacaaaaaaacaaacaacacatagttggtgctcaataaacagtcacttccagcatgaccaccactttagcctatggttagttacttcagcatccccaactcccaacccccatgccccgcccaatgtgctggagacttggcaggtggaccagtcaggaagccaactgcccatctctcactgctgccttcacccagcccagcattgctatttcctgctaccagcaggctgggggcctggttctttcactagagctaccatgcactgagccagcatctgatatgtgttaactcattccattctcaaaagccactgatatcatcttgcaggatggatttgggacctagcaagactgacttatccaaggtcacattgccgataagaggaacaactggggttcaaaccaaggcagctgggtccagagcctacgtgcttaaccactaccctcttgtcgcctctcttagtggcaaatgataaaaacccacttcctaagagttaaggcagacaggaaaatgtgtacatcatggagccaaattggagaagaaatacagctgggtgggccttaaagttagttgaaacctggaacataaacgctgccaggaccgtatccctggcccttaacgctgccaggaccgtatccctggcccttggctttctgtgcatgtaggttcggctcccagaccaccctctccaccaagctcagataccatctagtttcacatttcccggcatcatctgctgctgcctgaacccgaactcaccattggaggctttggcatcaataatcccgggggagggctctgactggccccgtttggcccagatagtaatccttggaccaatcagtgaggcccaggcaggagggggtctcccacaggcccggcttgtcttcagtctctggcacggagggtggggtcacgtgacaacacggaagtagccctcgcccccgcaatgaggcagtgtggtgggtggggagatggtttttcagaggaagggaggattcggactggccagaaaaaaaaaattgcggtctacctaccctgcccagcctgtgagaatcacacaggcccagcagaggggaagtaagtgaggcagaagcttgagggatgggaagcaacaagaaagggctgcgttggcggtgagtgcgtggagggtgtcaggaagacagtgcagtgtgttgcgaggaggagagtcagtgaaggccgaaggtggggggtcaaaccggaagacgaagcccttatcaaacgggcacgcgtctctaggttcctaaaaaacggaagaaaataaaaataaccggccgggtgcggtgctcacgcctgtaatcccagcactttgggaggccgaggcgggcggatcacgaggtcaggagatcaagaccatcctggctaacacggtgaaatcccatctctactaaaaatacaaaaaaattagccaggcatggtggcgggcgcctgtagtcccagctactcgggaggctgaggtaggagaatcggcgtgaacccgggaggcggagcttgcagtgagccgagattgcgccactgcactccagcctgggcgacagagtgagactccgtctc

SEQ ID NO: 349 - DNA, 2190 bp, Homo sapiens
gtgaaattcagaattccgtttccttctaactaatgaaaaactgcttactaaaaaaaaattttatactttccttgctaaggtcccatatattgatttgtacagatccacttagtcattttctcctttttttaagaaccattttcatctgatttttaaactcacgataccagttatctgttaatcaaaattgcattttacaatttaataatgtgatatttcctatgtctacagcataccttattaggtataaaacctactgcaacttagaaaaaggaaagaaaaaagaaaacttttccaactgctgcattaagatagggtggattttatgtgctttttttttttaagagttgaatttcttttcctgacttttaccttttacagcgtattacttagtgaacattacattttcagaatagatcctaatattttattgagggcctatgtgctaaaaactatgcatatctatatattggccaattatctttaataatttaccttttgaaattgcatgtttatcatatatccttaagtggacacatacagtgccatgttgatgtgcctctcagttttattgaaaagctgccccacagcccatgtctcttgttctctgcaatgcctcaagggagtgagctctcaaccacagatagctgtggcttctcagaagcagctcattgccaaggccaggctgagaggggacctgcttgctgtggtggttgcctagcccagatgagcatttacctaccaccttcccacttggctagctgtcctttggatatgtgctgttaactggggaaggcatctaactagtagcctgctactccatagtatggctcaatagatgacacatcattttgacattatcaataggagaaaagaaaactaacccttcttctgattgtttggagccatagttgtctcagatgttctaattctctttgtatgcttggaaacagcatagatatgttgctgtggttttcagaattttctcttttaatcacaagaagccttttaaaaaatgacttacacatattctcaatgtacagtaaaacagacagaagtgagcttatctgtttgatgctgtggcagggtcccagtcactgggcatatcctccttctccttaaccagctcctcagcagccctgagtcacctgcacaaggtgcttgggaactgctggttatgagcattcctggttttcttcagccaaataacaggtaatcactgtcaattggatttggtcttcattattttatattctgattttatcagaattattctattttaaaattgttttaaaatttaaaaacatttaattcatgatcatgttcatcagtagatgctattattcataagaactgtgattccagcaaactagggtaattggtgcctttttacagttttgaataaaagcatttacaatttctaaattatcagttttcacagtttcagcactcaacctcatcatacgctgatttaatattgttttacattaaaatagtccttttccctgttgtgccaccattcatttaagtgctgtttgttcttaaaatgcatttaaagaaaaattacccatattgactttcacacttcatataatcagatctattacaaatatatatcggagtgacggtgcccaggatagatgtaatatttcttacagatgctggcacagaggaaataatataccagctaatctagtcccctaaccttgtggttagaattgcaattttaagcccagaaaaatttgaagtctgatcagagatttacaactgttcattatagtggtgccttaggcaatctttccaaagtaaattccggcccccattgctacttatgccatatttggacatactttttttttcttcaattttgtaaacttcctggaaagctgtcttcactaagtctcccctagtctctatatatgtggttagtagtcatggaaatgacacataaagtacgccagaagtttgatggaacgtgttagaaactgttttgtgcttttttggatgtcatacttgacaatacatgtgtaagttactaatatatgaattgatgctaaatatatcttacatttgaattccttttggataaagttatttcttgatgtgacacagtagtgtgttttcatttttattcttttcatgtgaccaaaacaatagaaaagttaaaaataaaatatagtgttttaggtg

SEQ ID NO: 350 - DNA, 1013 bp, Homo sapiens
cgatagctttagttttatttatttttcaggggaaaacagttgaaaatgcccttgattcattcttttggtattaaatgatgcagctaatcttagagaaccctgagtgatgccataaagatgttgatgtgacctgcttaaggaaagtgcgtgggaaagtggccatttggaatagatttgttagaaaagtttgaaattcttggacttcaactaatttgttttccatggatcccatgaggatacttgtaaaagcagatgataggatacagtcggatcctgtgaatggcactagtttagttgtgttttctggatctcttccatatgtcgctgacttctttgtatttgaccgtgtatggatacacagaattttgtaggccagagaagaaaagaagctttataaacattccttaaagtgtgtaaaatacaaatcttcatttgtcttagcaagtcaataagtaattaagttgttgaactgattttttttaaaaaacagggaaatatcttaaaatttaagctgttaagttaaaatgtgtaattggtatacagcatattactgaaggtagaatgggcttcgtttggtaataaaggaaccagaaatagtttgaagtaaaattgggagatgattcatgtagatttactatattgttgtatcactttctagtgtgtagtactatgttatttaaaagagtaagtaggtaaaggagtggtatgattactttggatatttctgcttcagccacagttaccatgaataaatgatctgtctttataaaggagatggaagtgaattcaagatattgacgatgttagatttgactgggttgtcctttggctagaagatcaccagataaaatgtaaacctcctaaactagatgagatgataccattaaacattttttttggcccagcactttgggaggctgaaatgggaagatcgcttgaacccaggagtgaggctgcagtaagctataatctgccatgcactccagcctgagcaacaaagttagaccctgacc

SEQ ID NO: 351 - DNA, 1023 bp, Homo sapiens
gaggcaggtggatcacctgaggtcaggagttctagaccagcctggccaacatgggggaaccctgtctctactaaaaatatttaaaaaattagccacgtgtggtggcatgtgcctgtagtcccagttactcgggaggctgaggcacaagaatcgcttgaacccaggaggcagaggttgcggtgagccgaaattgcgccactgcactccagcctgggtgacagagtgagactctctctctctctcaaaacaaaaaagaatattatgaaagctggactatcacctgtaagtctgatttttaatagggaaacaatgatacaaacctgtctttaacaacagacaactcttaatttcaccacttaacatcctattattttgcctattcccgtcaaatctttatgcatgtgtatttacactgttataaacatggtgtgcaaactatttgttgttgggctattttcacctcacatcaagacttgaaaatgcccccaagtttctgtatatttctgtttctgttctaatgacttacatggtcgcataatagtcattgtgttacagtagcatatcttatttaatcattcctgtcttctggaaccattacgtttattctaatttttagctcctgggtaacacctcaatctgtatcttttatgaatatgtcactttgcttcttgttgccccaggaatacataggcaccagaggccaccttgatagtgttttgtgtagcctgttaggctgagtctagggatcactgggaattagctttgggaaggtgggcatcttaggcccaggctaatgaacttcaattttactgtattcttcatcagccattggaccttcctttgactacagccccaatgcttttctaatttggctgaaaatatttacatttataaaaaattattggctgggcacaatggttcacacctataatcccaacgctttgggaggttgaggtgggaggatcacttgagcccaggagtttaaaaccagcctaggcaacatagcaagaccccaaagctacc

SEQ ID NO: 352 - DNA, 1279 bp, Homo sapiens
ataatgtgtgcataatcattttaaatctaagtaacctatgaagtctgtgctcggtgtcatgaatattttaaatgttttatttcatgatgggggagaatttgcatgaaggaaattaaatatagttattgattgccaagtgagaagttggattgtttttagagataatagataataatgggcatatcagggttttttttttttgtaagtctagaaaagtttatgtgctgtagaagagatctagtctatatgttaagacattcccttgctaattattttcttctctgttgttctatttttttggtccagtttgctgtttttaaagttttgagtcccagctggtcctgtacatttaactgaaaaaaaagtaacttaaaataatataaaaatagcactcatgtatgtcctacagttataggtgaaatttgatattgtttgtcttacatagcatacctatagacagcttaagtaaagtgactgttaagagggttatgcttattgatgaactcttgtagttgtttaccagctctgttagtatagttaaattgatctcagtagcttcaagtatttataaaatggttgaagtccaaatacatgtgataattacaatacactttgaattaatggagggtgggaggctagttgaaatgcattttatttacccaaggagtatgttaaaatgatagttataaatgttggaagtttaaagcaagatactcagtttagttctttacaaatcataagaagaacaaaattagatgttgacattgctattttaggctgtgtgttttccatatgcttcttgctttccctgtcacaggtggtggcagcaatattggtgtgattgaggttatgctggcaccactcgcacacaggcgcacaatggtgttagctgggcagaaagagtggcatctctggctaccgggctgggggcgacctttaccataggatgaagtaaccttgcattcggctgcaaggtgtactgtacgtacacaggtgctggtcgatgtccactttctgcttttctttctttctttttttcttttttaaagtaatttcccccacagtaaaatacactgactcctgagtaaattgattttccagttttatggaattgggagtctgacaagtgaaaccaatttaatgtaaagtatttggctttcaaatggtttctctgtgctattttttggaattctttcagattccagagatatcttacgtctttgattcaatttaaaatttgtacttattttcttttagaaataatgtattgtgtctgtgc

SEQ ID NO: 353 - DNA, 321 bp, Homo sapiens
gacaataaactctccgagaggctaagcatctcggagagtttattgtcagaatgtacattataaatggtctggctgcgttgttgaagcaaaccaataatgtattcattttcaatctgctcatgcattttgaactccttgaaagtagcatacaaagactgcagaagagcacggaaatcgttgttgttggaaaaattggttttagaaagcttgtcgcagtagagccccaccagctgcttcatccgccagtgtggggcggtgaagacgtccacttcttcaggaaagggcgccatcgccactgcctcagcctccgcctcagcagcc

SEQ ID NO: 354 - DNA, 1422 bp, Homo sapiens
  misc_feature 1422: n=a,c,g, or t
gtaacattcttagttttaaataaaaccctcaaccttctctttgtttgttggacatactaaagatcacctagaattgaaattctttcttctcaaaacattaaatttagttttgtgtctacattttcattttgactttgacatgcatggtgtcagaagtgggatacaaagctgactcacctcatggagaatcattggcctttggagttatggcatgaggtacccatgttggggccctttgaaccccctacacccccaccactttcacaggtaatcctttctccctccagtaagtatctcttggacagaactctcagatatggttcgagttctgttttatttgggatatgattagggagaggtctttccccctcttgtttggtagatctgttgggtagaattattttccccctgttgacctcagctgcgaggtttggaccttgaggcttggatgagggaatttttccctttctttggagaaggcttatcattcttactggtaagcatgtattttattttctgtcctgtcttgtatttatttggcctttgtgtattcagtgcttgcatttacttggcttttgcatagttgacattaaatcagagcacccacgaaatgagctctcaaagttcaaaggcatgccagaatattttctggaactccagctagtaacatattcaaacattacagggatcatttagtctgtttttcttaaaactgaactaaaagatggaggctataaaatcatacactccaaataagatatgcatatttcattgatatcttgagtctaaaaaaaaataaaaacaaaaacaaaacacattcaggatacaaatattgccttgttaaaaaatactgtctcaaaggtggctgaaactttcttttctagacctttcccctccccttcttacagtatcccctctttatccttctctaaacagctattctaacatactacttaaataaaaacacttgaaaaccagcagatataaaacaaagtcattttgaccttcctactgttttttttttaaagcaaagattaaattcccatgtaaaaccttcctccctatacaaaaaagaatagcagcatttttatcttcaatgacaaagaattgagtccaagaaaatactgtataaaccttgttaaaaatcactcttgtcttttggtcctactcacataattcagcacactttcacagttaactattttttgttcaatttagtgcactggtgagtgactcaaactgctttatcccaaatttgatttacagcctttataagattgcctattaaaaaagcttaaagcttatccttagcccattttgtcagaaaaataatttgcatctaatcatttttataaactggtgaatttacgtgttttactatatcatgactaaaattctaaaataaaagttttaatatctttn

SEQ ID NO: 355 - DNA, 2085 bp, Homo sapiens
  misc_feature 1250: n=a,c,g, or t
ggcatgtgcttgtagtcccagctacttgggaggctgaggcaagagaatcactcgagcctaggtgttcaggctgtagtgagctatgatcaagccactgcactccagcctgggcaacagagcaagatcacgtctctaaaaaaaataagcaagtaatatgcagtttcccccctgtggtaacatcttgcaaaactatagtgcaatatcacacccagatattggcctcgatacagtcaagatgcagaacagatccatcatcacaaggaccctcctgttggctttcatagccacaccaactgctccttatcccctagaatccactgatctattctcccatttctaattttgttgtttcaataattttgtatgccttcatacagtctttttgggattggcctttttcacttccatggttctctggttgttgagtttatcaatactgtagtttattcctttttgtggttgatacagacttctatactatgatctggatatgccacagttagtttaactgttcacccactgtagaacatctggtttgtttcctgttttcacttttgtgaataaagctgctaataaatattcatgtcgaggggaaaaaagcaatgtggattaattgtctcatttttctatttttcttataagtaccttacttgtcagaaacttgatctttaaaataagtgatgcacttggtgaaaatttattgagttgtacacttgcgtgtacttttctgccagtatgttatatatttgagtgaaacatttatttaaaaataattagattttttttcccctctggggtttacttaggttggattcagatgccgaggacacagtacttcctcagaaagaagacagaatttgcaaaagagaccagataataagcatttaagctctagtcaatcccatagaagcgatccaaattctgagtctttatattttgaggtatttttttcaaactctatttgtaagctgttataggaaatgttcccattaagaaattaatttgttacattgtgaacattgtgagtactttttatgtcttaacatgtgattctagtattaaattataaattactcagaagtattaactcatttttgtcttggttatatatatttaatctaacattaattttactgatgtttatttttataaatttttgtcctgtgtgttcatcatttagggggtaatgtatagaggtagaacttgatttcatgtggactttatttagtatggagctttttcacttaatttttgttgttattcaatccatttgaaaggcttttcagatttgagtagttcagtctagttaagttgtgctgccagccaggagaattttagagaaggaagaaaaatgttttactttctctgatagacagttcatatcctaattgcactgttattcatctaacagattcttactggtggtctagtatatgtgtgcagtaaggtgctctgaatgatacattaaggtgaatagacctgctatctttgggaaagttgctgtgtagtagaagaacataggcatatacacacctaatacttagttgagtgtggttagagttgagcgcagagacaggtcactttgggtttgtggcagggtaggtaacatttgaaatgaatttaaaaaacaagtagaatttgtatgtgtcaagatgtttttcaccacacatctccggtaactcatttgagtaactcattttggttggatcataaattctattgaatgagttaatagatgggaggttaaactggaaaacttgcttgaggtcagaggatagaaatcaataatatgctgggcgtggtggctaatgcctgtaatcccagcactttgggaggccaagcggatcacctgaggtcaggatcccttgaggtcaggagttcgagaccagcctggccaacgtggtgaaaccccatctctactaaaaatacaaaaagttaactgggcatggtggcgggtccctgtaatcccagctaactgggaggctgaggcaggagaattgcttgaacccaggaggtggaggttgcagtgagccgagattgtgccattgcnctctatcctgggcaacaatagtgaaactccatctc

SEQ ID NO: 356 - DNA, 2321 bp, Homo sapiens
ttttttttttttttttttttttgtatgtattatatttcatttattttgagacacattttttctaacattttaatgtgtgtaaaatcagggtgaatcacactgttagtacagtctcataataaatttacagttttaagtacttttttgctgatgtttaaataataatttattttaaaatacatgaaaactctgatttcatcaaatttgaaaatcatttgaaatatgataagattgacttttgggctgatatcttgggcttcttggtacttattgcgaatgggagaggagacatgatgatggctcatgggatattctgatatgacctgttaaaaacagaagaacaaaagagctccacataaaagatgtttgtacacccatgctcatagtaatattattcatgatagttaaaagtgaaagcaacccaagtgtccatagatagacgaatggatgaacaaaatgtgttatacgcatatggtggaatattgttcagtttcaaaaaaggaaggaagccctttcatatgctacaatgaggatattacgctaaatgaaataagtcacaaaaagacaaatatttacaattccacttatataaggtacctagaatagtagaattcatagagacagaatgtagagctgtcctaaccagggcctggagaagaggggaaatgggaacttgcagcgtaataggaatagagtttcagtcttgcaagacagaagagttttgaagattgcttgcacaacaatgtgaacacacttaacaccactgaactgtacacttaaaaatggtaaagatggtaaaccttatgttatgtgtattttaacagaattttttttaagtccacataaaacgaatgggagtttggggaaaggatatggtgaaaggattgaggataaacaatttttaaatagataaaatggtaaaaaacagtggaagggtgaacagaaaagacatattaaaaaaaaaaacaacaccacccacaactcaccggcgcctcatataccataatgcaaggcatagcaaaaggagcaaggaaggcactattattgccaaaacaattgagccaatggaggtggggtttcctggcaattgagagaggacaaaaggatgtcacttcagatactatacacagaattccttggccttcctttgcccacctacttccaatgtatggtcatttccaacttcctctctcatattcctggccaccatatatccatcctttgatcccctctacccagtttacaggtccttaattcctacatttttgataacttggattatctatttttactcctgttgggattggggtcagggaaatcaatcaatcaatctctccctctttcatctctcaagctctatccttccccagtgcctccctctatgcctgaagatcacttcctggcatttccagcctgggtccctgctatttcttactccagtagaggatgatgtcctggccctctaaactgctgtgcttcacccgacaggacaggccagccgcctccccatctgccacatccagggttgctcggagataccatgtccagttagcattgggcaggatgtcccctagctgagtgccctgctgctcctgctcaccccgcatccacatcacccacacgggctttgggtagaatcctgagacatggcacacaagctgcagacggccaggtccaggactggggccactggacagccaggcctcaggcttcactaaggcaggaaggagaaaaaaaagtgtcatgttataactcgagttcagaggttatgaactcagaaacctacaagcttggacagcgaccccattcactcctttgggaaccaaataacttgttatttaagctcctatcctttgatatcttcctactcttgatcttagaggaggtggtgggaagtgaaataacagcaggactaaccttgtctttgcagatctgcttttcctgcattgaggacgcccaagagatatcgggggcaggtttcatagaggagaattctcacagtttccatgataccttgatattgtatgattagtgcacagaatttctgtgccctgctgccaccttctggggaaggcacacatgaagcattcttgacactcaggaaatccaatcctcctagagctcccctcaggaagcttactatggcacctccagaatgtagctcacagcctgctatgccctggatctcaaaggggtatttcatctggaaatcaccggcaaagtcttgtacttctcgagcgaatccaaagatgtagactcggaatatctcctctaactcagcaacctccttatcactaaagttacctttagaaccttagaaa

SEQ ID NO: 357 - DNA, 1747 bp, Homo sapiens
ctggactatacaactttcatttaacttttaggtgactgatttaagttgagtgtgcatatagagaaaaacctagaaatttatctcatggcagatacatttgaaagtacttcagaagaatttatgctgtatattaaaactaggctcaaaataaatctatcgtatctttaaaagtccaattctgttattactgtgatgtttgtagtgttactattaaacattgtgaacatacacatttttaaaacaacttgaaacccattttaaaatctgggtaagagagaaggaatcttcagaacaaaatcacatcattagggtgtccagtttatgattgaatttttaagcaaattactgtatttgaaactacaacttgatttggttttcagttttaaaaggcaacatgtgggttttatccattttatttatacctttagatttcagaaacatcttcatgttttagatgcattctacagacatcatgttacttaaaaactcagggcccctttcatccctttgtacactgaaaaagttcaattgttagcaagtaagcaattagatccagttgaatatttaaagtgtttgttgcacagttcatttaatgtttcatcttatttgactttttcacatagatataatatcagatttcattaattataaaaagttgcccagttctgtaattactgaacagagggaatgactcaactaattggctacatgttgcaacaaatttaggcctttagagttgaagcactgacttaaaacgacttacatttctgttctttggtcaaatgaccatacatgatatgggacaaattgtttcattttgtttgttttttaataagggaacttggtaaagtagttcctgtcagataggattttctcaagagacaatttaacgttataaagccttctaaaagtgaactaaatattttataactttagtaatagcttggatggttttgagaaaataacctgtatttatcacattgtcaaacagaatttttctttgaatcagacaagttcaagctctaaattgatgtgctatatacttaaaatcctaggaagttatctgtaaccagtctcttgtctcaggctcttcaccttgttaccaatcctcgtaagtatgtaaaggaaacatatttttaaagaagcttaacagtaagaaaaaattactaaaagatgcaattcaaagataggtcccagtttaacactgaattgcttgacttctgtggcttttctttttctggccacatttatttatttaagcaatttttgtatgccttggtatttcatttccatagagattatattgtatcagtgtttatgtaagctggaatcatcctcagttttttgctgataatttttcaaataaagatacatggataattgtaaaatacactaactcttagggtgttgtagtagctgaaacatggagatgcgtagctgtcatgctttttctgaatggacaggagaaacataagctacggagtattcacttctgaggatgcttttccggaaaaagaaaggctagaaaatactcgcacttcctcagaaccctctttcttgttaacgggtatcttttgttggtgtgttttgctcttacattacagatagactatcatatatgactttatgaataatttcagttattttgcttttgtataagctgtctgaagccttgctatgctgtataagttgtgtttgatggatcagtgtgagtataaaataaagcaaatcacttttcttttgtatt

SEQ ID NO: 358 - DNA, 1893 bp, Homo sapiens
ctggctgtgataagattttgtgaaccaaatgcacaagatactatttaagaaatcagtcttctaaattgtgttggagaataaccctatactcaaaatgtttttattgattattttggccactggcaatcaaggcatctgaaaaaccgagaaactataatcataaagttactggctgaatttaaaattatttattcatactttcagaaagttaccaatcgagtccaactaaatgcaaagaccatgtaaaaaaaaatgagaaacagaatatcatggaggataagtatctgccacgcagaaacatttaccagggtggtaaagatcttgtattaaaatatacagagtttagtttcaaagtaatagtagtgaatatcttggtgaatccttactgcaatattaggaaatggatatgcccaatgcagagtaaatttaacagttctttcttacataccaacatgaataaacatgagcagttgacttgactttgtgaccacatgaatatggctacgtgaatggacaggaagaatcccatgaagattactagattttatcctggattctgagaataaatgttaaaaacaaaaagctatttattcccaatctcactgtcttaatgaacttttatgtttctgtcaaatgggagtggagaatgacaagtaatcttaaaatatttatggagtcaacaaatgtttatgatgtgccacacacataagggttcagcacctaagaggcagcacttggacacctacagctcggaagtgatcaagacagaccttggctcccaccttcatgcatctaagatgacaatgcaatgtcagagtgaacattcagtaggacttgaagatttgtgacaagagttcagggaaaacacatcagaatttttggtgatgtgcatttagtaggaagttgtggttaaaccttgagaataaatttgtccctggaaagagataaaagaacaaggacttaaggactaaaatttgagtaaagctttcaattaggaaccaataaaaagatgaggaatgggagtggaagccatggttatggagtttggaaaagtatcaaggtcaggtgcacggatataatcctatgtggccaggaagtttcaaaataggaagaccgacagcctataccgaaggctgtgaagaatgaagtttggaggagagcctttatacttgattaggaggaaatgggtatcatctgcccgtgaacttgacactggggttggaaatgagtcctgagatatgggaaatagagaaaaatcacatatacagcttgttacgtaaatccagcagcgaaaggaaggtgacaacttcacacatggagtatctccaggaggtttaaagataatgtggataaatgttgagaccaatttttcttgtatgtaagttctctatagctatgtctggagtatggatgatttttatgtaatatattataaatcttgacttttggattgcttctttggtggtacaaaatagaaaaaaatgctattttgtattaatatgctttagtcactttcttgtaagccataaaacatttaaaaagcagactttatgcaaattgataactaaaaaattgttttacacagaaattaagattaatttacttaaacactgtgctctacattatctttatcttgatgtttatcttgatgaccaaattatgtcatcgcgggaaatttctctttatccattaactaaatacatttggatactaagggtagtgtctctaagagtaagatttatttcttaaattaatatattcatgaaaattcaaacaaacatagatcatctattagaaatgtaatttatatacagcattaactcggaactgattctttgtttttcctcattcttctgggattcttgaaacacaaatctaaatgtatgtggctgc

SEQ ID NO: 359 - DNA, 2151 bp, Homo sapiens
caaaaatacaaaaattagccgggagtggtggtgggcgcctataattctagctactcggaaggctgaggcaggagaatcgcttgaacccgggaggcggaggttgcggtgagcccagactgcgccgctgcactccagcctgggcaaaaaagcgaaacttcttctcaaacaaacaaacaagaaagaaaggacctgtttccaaatacagccaccctttgagggagcgggggttaaggcttcaatacattgattttggggagaaacagtgaaggccacggcaagaagctgcagtcattgtgggcgggcctgggtggggagtgcaggggttcctgtcctgtgtgtctgtttcccaggggagtcctgacctgactctcacagcccctccacccagatgttcctgtgtgcttcacccaccccattccttctgcacccaacactcctgagcccctccttagctcccccgacaggctcccctgctcccccactcccgggctgctcctcttctcagcctctctctgggcctctctggggtccggacatgacccctcagctgatgcctgtggcttccccagccagaatcttcccagttccaggctgggctctgcagagtcctatcaaaggtggcatcctcccctctgtccactccagggtgaagatctggtgtttctggtttggaaatgcctctgcactgggtgctaataattcacttttacctttataattgtggttttgtaaggacaggtatttttggcaacagaagaaatcctgtgagttatttaaaaaaaaacaaaaaaactccctggcaggctcttctccccgctggtcccgctcaggagtgtctctgccctgatgctgggtgtggcaagagttaaccctgtaggcaggaggggtgccccagtgggtccacctccagcaaggactgagagcgagcagagccaggactggggtctatggtgaggccagggaagaagacccagctgtaccccagggagagggcctgagcacactgagctgaccctggggagaccctgacaaggcttagacaggccccagggctgccgtgatctcccagtgagccccagaaggggtcagagggggaggtttggaggctctagcaagtgagtgggagccccttctgacaggtgctaagggatgtggggagccgggggaaggaaggagggtggggtgcaagggaggaagcgtggagagggagggggaggtgaacagaccagaagggctctttactcctctgggcttttcccccactttccagacactcgatggatccacccacattcactttcaactttaacaatgaaccttgggtcagagacggcatgagacttacctgtgttatgaggtggagcgcatgcacaatgacacctgggtccttgctgaaccagcgcaggggcttttctatgcaccaggctccacataaacacggtttccttgaaggccgccatgcagagctgtgcttcctggacgtgattcccttttggaagctggacctggaccaggactacagggttacctgcttcacctcctggagcccctgcttcagctgtgcccaggaaatggctaaattcatttcaaaaaacaaacacgtgagcctgtgcatcttcactgcccgcatctatgatgatcaaggaagatgtcaggaggggctgcgcaccctggccgaggctggggccaaaatttcaataatgacatacagtgaatttaagcactgctggacacctttgggaccaccagggatgtcccttccagccctgggatggactagatgagcacagccaagacctgagtgggaggctgcgggccattctccagaatcaggaaaactgaaggatgggcctcagtctctaaggaaggcagagacctgggttgagcctcagaataaaagatcttcttccaagaaatgcaaacaggctgttcaccaccatctccagctgatcacagacaccagcaaagcaatgcactcctgaccaagtagattcttttaaaaattagagtgcattactttgaatcaaaaatttatttatatttcaagaataaagtactaagattgtgctcaatacacagaaaagtttcaaacctactaatccagcgacaatttgaatcggttttgtaggtagaggaataaaatgaaatact

SEQ ID NO: 360 - DNA, 1107 bp, Homo sapiens
tgtagagatgggatctagctatattgcccaggcttctcctggtctcttaatgtctgccccatcttagaatcttgtgtttctcaccatctatgtctctgagattttgtttttgtcttcctgtatgtccatctctccccatctctgtctttcatgtctttctctctgtctctgaccacccagtatctctgtgtctcactgtctctggtcatgaaatgtctgtcattgtggcccgtttcacactgtctctatatctgtttcccctgagatccgggatcagttgaaggaagaggagatccacatctaccagttccccgaatgtgactctgatgaagatgaagacttcaagaggcaggatgcagagatgaaggaaagcatcccttttgcagtcgtgggatcatgcgaggtggtgagggatggcgggaaccggccggtgaggggacgccgctactcctgggggaccgtggaggtggagaacccacatcactgcgatttcctgaacctgcgacggatgctggtgcagacacacctgcaggacctgaaagaggtgacgcacgatctgctctacgagggctaccgggcccgctgcctacagagcctggcccggcctggggctcgcgatcgagccagccgcagtaagctttcccgccagagcgccacagagatcccgctgcccatgctgcctctggcggacaccgagaagctgatccgcgagaaagacgaagagctgcgccgcatgcaagagatgctggagaagatgcaggcccaaatgcagcagagccaggcccagggcgagcagtcagacgccctctgaggccacgccccgcccggccttacctcggctccgccttcagtcggcctcttgtccaatccccgcgccccacactgcccagcgccccccgggacctccgcgggtgccgccctcgcgcgggctagggggaggttctcccagcctgagtccgtagccccgccccggcgctggtcccgcccacccagacaccgtccacttcccggcccggggcctgcacaatctccgaccgcatcactgtcttccggagtcccccttcttctcccagactctgtcttcaataaaaactgagcttcccgcgg

SEQ ID NO: 361 - DNA, 1421 bp, Homo sapiens
  misc_feature 1386: n=a,c,g, or t
gtttcatatttatggcttttgttcactatcatgaatatttttttctattcttccctatctttaggttgcatagaaaatattataaatattttagcttggggtaggtagctgagtgatgaaataaaactggttcttgaaatctttgagctttgtgtttatattcttggcaatgtttgctgttttaaagggggtggcatgtttacatcgaaatgggcatgtgcatgtgtcaatcagaattctgctccccctacacacccttcccgaaaacccccacccccaccgcaggtgctctgttctgccaggcatgttacctctgctatacaaaaaggtgtttttggcaagagtctccactcaagttgtgaaagcatttctaattttgtctagacttgcctgcgttcacattcagagacgtctttgtctctgaatgttacgtgtggatatgtgtgtactttaaaatagccacaaacccaacaacttccctgaatcttattgccaagggaggagtagctgatgcctttacaatggttcaattctacattccatagaacataaacttttaagaaaaaaattcagattataaaaaatgtacttaagattttttttaatgggctttcctggtctgtgttttacagatagatattagctttctcctggatgtgagctcactcagcagagcggaagaggacctcagtatcacagtgcatgctacctggtataatttattgttaataaaatgaactagaaatatacccccatattctgaggggggggaattaggagaaccgtaaaactgtgttccattaattgtaagagaaaacttctcttacgtggtatgcttttaaaagaaccaaacaacatagttaaatgggagttactggcaatgttttagctcttgagctatgttaagtatttattagattagattagagtagacatgatgtgtcacgaatcaaactgtgtatttgaaatcaaaaacagaataaacagtttacaagtaataactctacaagatttaaaagtgagggtaatgacttccatagatatgtctcctagagtaaataggaaatcgttaatgactatttcatgagtgaagtttcaatatattttttaaaattcggaataaacgtcaagatggacttcattttacctaacacaacaacttggtcaccctctcatcctaaaaatctctataagtaaaactgattataaagatacgttaaggcagtacatgacttgctatacagtttaaaaaattatatgattgatgtgctttctttgatcattaagtcttgcaaaaacacttcttcaacctaaagagagtaatagatttgtttctaaactacctatttattctggtttttgtaccacctagaacataaatgttanaaaatcttttaatctaataaatgtaactatttgtt

SEQ ID NO: 362 - DNA, 1335 bp, Homo sapiens
gcatggtgctgggatctgtgtggcttctggggaggcctcaggaagctaacagtcatggtggaaagcaaaggagatgctgacgtctcacatggccagagtgggagcaaggcagcgggaggtgccataccctcttaaataaccagatctcaaaagaattaattcactagctcaaagacagcgcccagccatgagagatccacccccatgacgcaaacacctcctaccaagccccacctccaacactggggattagaatccaacatgagatttagaggggacaacgtccaaactatatcagggttcaattgcacaatttggttctgcagtggacaatattttcataaagattttgttgtgaatgtttttagttttcagtttttactatcaatttatagacaaagcatccaaacattaattgtagttacagaatggaggttgggaggtagagaggtggaggaagggttagtggtattgatttcttcaaaaaacctgaagggagttaagagatatttaacatttgaggggtcaaaataggtttagggctgtagttcaaatggtttaatgatagaggcgccatgctgaggcagtatagcagagttgttatgggcacaaatccagagccggacttccagggtttaactgcttgctctgccaccttgaactcagccagattacttaaactgtgccttggttttctcatcaaaacatggggccagttataggtgtttttttctgtttttgttgttttgttttgttttgttctgtttttttgagacagagtctggctctcacccaggctggagtgcagtgtgtgatctcggctcactgcaacctctgcctcccaagttcaagtgattttcctgcctcagcctcccaagtaggtgggattacaggctcctgccaccaagcccggctaatgttttgtatttttagtagagacggtttcaccgtgttggtcaggctggtttcgaaatcctgacctcaagtgatccacttgcctcggcctcccaaagtgctgggattacaggcgtgagccactgcgcccggccataatagtttttatcttataaggttgttctgagaataaaatgagttaatacagtgcttagaagagtatctgaaacataaaaatcatgagtgttttttatgatgcagcagctgctgaaggaaaacaaaagaactcaaaattagcatttcaatcagcggagattgggaagagggagatagtagtttgagagttaattttctcatcttttaaaatgggaggttaatagacactttaaagttgacaaatcaagaaatggaagcataactatcacaatggaagcaattctc

SEQ ID NO: 363 - DNA, 1364 bp, Homo sapiens
  misc_feature 1329: n=a,c,g, or t
aataaccttcaccctgagcttgctgcttttattcccaactcttggtaaatagttttgtgatgtctcataaaactcctacatctttacctcacatcttcagcaccccaccctctcacacatacccacttatacaaactcagtaaacagactccatcacttaatgttttcttgttccctatgaagtcaaatccagatgcagcctgcgcccagtacttttctgactttatctactgttctttcccttcacaccctcagcttttagctaaacatggatgtatagccccttttttcctcctctttaatttacagatttccttctccccccccgcccccttcctatcactcttcttgtgccctaaaattatctaccttttaaggtccaactctgatacctccttcagaaatacagtttctctctctgtagtctcatataattaagatttgctttctgtggtacttatttatagcgcaaggaagagtataaattccttcagggcagagtcactgtgtttttcctctgttctgcatctagaaagtactttaggcatggaatgaaagaaattttgctgggtgcgctagtaactggcttattttcattcttcagtgtcagctcaaagtcacctcttcagagaggctttcccttgccacccttccttctgtaaccacttctctcccttcatcatactgccttgctagtttattattccattgtcctaatcacaataggttattttcttatttatttgtcctcctccaacatgaatataaattcataaggttggtgactttctaagtctcattctctactgtatgtctagaccccagaacagcacatgccccctcagtaaacattgaatttctgctctagcttattattagtcttcattttaaatgcctgaagcattgtgtttttatttaaagccttctatggttacaaacaaaatgtgagatagaagctcatcttttgaggacaaaataattctacaaataagataatagtcatctagattaaatttgtcaatttacagatataaaaactgacatgacatgagatggtttaagtgtcaaacataagggtctttggctaggcgccatggttcacgcctgtaatcccagcactttgggaggtggaggtggatggatcatctgaagtcaggagtttgagaccagcctagctaacatggtgatacaccatctctactaaaaatatgaaaattagccaggcatggtggcaaactcctgtagtcccagctactaaggaggccgatgcaggaggatcgcttgaacctgggaggcagaggttgtagtaagccgagattgtgccactgnactgcagcctgggtgacagagtgagactctgtctc

SEQ ID NO: 364 - DNA, 1937 bp, Homo sapiens
ataaataatagcattgttaaagatagttattaccaaaaaaagagagttattacaaataaatatgtctctttatttttaaaaatgaaatcttaattcatttactctatttgatgataaactataaattcattgaaaatgtgaattctattatgggtagcctttttaccaattataaggaaaatttacagcagtgaacatgaacattcacttagcttcctcagtctctccatcttaaagatcatttatcagaggaggttcagcattttttgcagcataacttttcatgagtctgtattactaatggataagtcaaatccatcctgcacttctacagtttagaaagtatctggactcagaataaatgtaatatttatacttgtttccagaatgttattttacattttatgttcaataagaacactttttaaaagacgtatattcaacataaaatcagctatcagacttcagattagactttatttatgtgggtctataataattgtattttcaagaggttttcactatatttgtattggcctggttttctcagacgattttggacaaatcattagaaactgggcatcatatccacagttatgtaaggcagtgatatactataaggataaacaaagtcaagtccataaagcaataatccctcagaaggaaagtccttacttttcacatattaatatttagtaatttttcctgcttctaaaagtgagagtatcacaccctaaatgaacactgtctactaagagacatcattccatttccacaaatgaagattttattccaagaaacgagtttactgattggagcatagggcttgttgttatttttattcaagcttttagtaatagccttgaatttattatttttcttataggctttttgttaaaatagtgaagggacaaatgttaaagggtaagataatttccctgcaaaaggacacagaaggcagtcttaagaagatgaatggatgagaggaggggagagaataaaatgcaataacgagccagcatttactatgtattttccccccacctgtctctccatatttaggtcacttaccagtttctgtgcccttttggagcttttgttgagggcttcattctcaccctgtatttctttagccctaaattgacactctctccaaaaatccattccattgtctgtggaccaagatgttctatgtaattcagaagcagaactcttggctaaagggctagtgtggccttcagaaaccattcaattattttctccctacacctttgtcagtttgaaaccagtgaggaaaaaaggtatgttgataagaaacctatattgctaggtagaatttgtacttgttttcttggtagcagttttgaaatattctgtacagtacgttcctattgtttaataataaattcaaaaatatttctaaaaccttaaaaccaactatgccaagcattaagataaacaaatatgatgttctttgacgtaaatcaacgtgatgattctttcacatgtaaacacattttagtgtttctggtttgtcatttttgttgttgttgttgttgttgttatttactctataccctttagcaaaatacagttttaaatttttattgtttttagtagtttcccaactttaagacttatctaatttaactgagaaagaaagcctttttcatatatatatatattggatttctaaggatggtggtttgagccttgattagacttttgatgtgctaagccagacaggcagtctgtacattgatggccatcacaatgcagctttggtttaatttaattcaggcctgctgctgagttatgcacagactttttgttgaccaaaataaaatataaagggttttcttctgtttgacatttgtgttcattttttctctttatgtattacattttaacctatattaaataaatgtttaaatgat

SEQ ID NO: 365 - DNA, 1479 bp, Homo sapiens
  misc_feature 451: n=a,c,g, or t
ccaccaagaaggtggtggacaacaccacagccaaggagtttgcagactctctgggcatccccttcttggagacgagcgccaagaatgccaccaatgtcgagcaggcgttcatgaccatggctgctgaaatcaaaaagcggatggggcctggagcagcctctgggggcgagcggcccaatctcaagatcgacagcacccctgtaaagccggctggcggtggctgttgctaggaggggcacatggagtgggacaggagggggcaccttctccagatgatgtccctggagggggcaggaggtacctccctctccctctcctggggcatttgagtctgtggctttggggtgtcctgggctccccatctccttctggcccatctgcctgctgccctgagccccggttctgtcagggtccctaagggaggacactcagggcctgtggccaggcaggncggaggcctgctgtgctgttgcctctaggtgactttccaagatgcccccctacacacctttctttggaacgagggctcttctgtcggtgtccctcccacccccatgtatgctgcactgggttctctccttcttcttcctgctgtcctgccaaagaactgagggtctccccggcctctactgccctggctgcagtcagtgcccagggcgaggaatgtggccaggggatccaggacctgggatccagggccctgggctggacctcaggacaggcatggaggccacaggggcccagcagcccaccctttcctctccccactgcctcctctcccttcctacactcccagctcgagccgtccagctgcggtgggatctgagtatatctagggcgggtgggcgggtagcagtgctgggcctgtgtcttgagcctggagggagtctgctcctgccgccctctgccctgccagagacagacccatgcgctgcctgcccaccgtgcccctttgtccccatgtcaggcggaggcggaaggcccaccgtgccagaggctgtggcaccagccttaaccctcactctgctagcacctcctccctttccccaaggtagcacatctggctcactccccactccgtctctggagcccaccagggaaggccctcatcccctgccgctacttctctggggaatgtgggttccatccaggattgggggcctctctgctcacccactctgcacccaggatcctagtcccctgccctctggcacagctgcttcctgcaagaaagcaagtctttggtctccctgagaagccatgtccctcgtgctgtctcttgcctgtcccacctgtgccctgccctccagcttgtatttaagtccctgggctgcccccttggggtgccccccgctcccaggttcccctctggtgtcatgtcaggcattttgcaaggaaaagccacttggggaaagatggaaaaggacaaaaaaaattaataaatttccattggccctcgggtgagctgagggtttttgc

SEQ ID NO: 366 - DNA, 1408 bp, Homo sapiens
  misc_feature 1254,1257: n=a,c,g, or t
ctcacctagcatcttccagcacctggacgaactcaaggcattcttcgcagaggttgtcagtgatggtgtacccctggtgctagccctggtcccccaccggcagccccactccttcatcacccagggttccccagacctgttggtgactgtgagtgccagtgggctgctgggcacccacagctggttgccctatgaccgcaacataagcaactacttcagcttcagcaaagaccccaccatgggcagccacaagacgcagcgactgctgagtggcccgtgggtgccaggcagtggtgtgagtggacaagcactggcagtggccccggatggaaagctgctattcagcggtggccactgggatggcagcctgcgggtgactgcactaccccgtggcaagctgttgagccagctcagctgccaccttgatgtagtaacctgccttgcactggacacctgtggcatctacctcatctcaggctcccgggacaccacgtgcatggtgtggcggctcctgcatcagggtggtctgtcagtaggcctggcaccaaagcctgtgcaggtcctgtatgggcatggggctgcagtgagctgtgtggccatcagcactgaacttgacatggctgtgtctggatctgaggatggaactgtgatcatacacactgtacgccgcggacagtttgtagcggcactacggcctctgggtgccacattccctggacctattttccacctggcattggggtccgaaggccagattgtggtacagagctcagcgtgggaacgtcctggggcccaggtcacctactccttgcacctgtattcagtcaatgggaagttgcgggcttcactgcccctggcagagcagcctacagcctgacggtgacagaggactttgtgttgctgggcaccgcccagtgcgccctgcacatcctccaactaaacacactgctcccggccgcgcctcccttgcccatgaaggtggccatccgcagcgtggccgtgaccaaggagcgcagccacgtgctggtgggcctggaggatggcaagctcatcgtggtggtcgcggggcagccctctgaggtgcgcagcagccagttcgcgcggaagctgtggcggtcctcgcggcgcatctcccaggtgtcctcgggagagacggaatacaaccctactgaggcgcgctgaacctggccagtccggctgctcgggccccgcccccggcaggcctggcccgggaggccccgcccagaagtcggnggnaacaccccggggtgggcagcccagggggtgagcggggcccaccctgcccagctcagggattggcgggcgatgttaccccctcagggattggcgggcggaagtcccgcccctcgccggctgaggggccgccctgagggccagcactggcgtc

SEQ ID NO: 367 - DNA, 1302 bp, Homo sapiens
  misc_feature 1000,1265: n=a,c,g, or t
aatcttttggctgaaatggaagattctgttaaatactttgaataaacttggggggagggaaataaaattgcagaaaactgcagagcactaaaacttaaagaagggctacatctttatccagaaacctgttgctcttttgcacggaatgtttaaattcagagttgggatgggggttggggtgaagcacacttattatcttcagttgcagtgatttcaaatttaggattttttgttgttggtttgaactgtccccttagtttcttgttatttccaatttttctgcttagtcattacttttaattcttttcttactaaaattttatggtggttgggggaagggagttagcatcactaacctgacagttgttgccaggaatttgctttgtttactgctagtatattagaaatcctagatctcagaatcacaatagtaataaacaacaggggtcattttttcctaacttactctgtgttcaggtgtggaatttctgtctcccaagaggaaatgtgacttcactttggtgccaatggacagaaaattctacctgtgctacataggagaagtttggaatgcacttaatagctggtttttacaccttgatttcgaggtggaaagaaattgatcatgaatctctaataaatttaaatctcttaaaccagtaggtgcttaatattttttgatttgattaatgcccatttaaatctcatgggttctattaaaaatatatatatatagggccccaatccattgccatcaaattgcccttggacttttccaaggtatattatggggttttatgcaaaattccaagctaccatgtaactttttttaaccatttaacaaggagggggaactgtttcctaccttctttacatgttgtgcattgttgtggtccagaaatgccaaacctttttaaagatggtgcaactttgagtccttggcttgactatacaggccttgaacttcatggcatatcaactttgccatatctgcaggagngctgttctataagaaatagctcagagttgcaaatatcacatgtgaatgatacggtaacttttaagaaatgtctgtattgtatttgaagactgtttgccataaatctgaaatttgaacctatgtatttcaatttggtatgctaaaaagttctgaattaatgtaaagttttttgttataatattgtaatctcagttcaaaagttaactgcaaatataaaacccaatgatttctatatagtaaattgaactgtaaaggtaacttgtgngtgattctgaatacatagataaatgtttttattcctc

SEQ ID NO: 368 - DNA, 1082 bp, Homo sapiens
tttttttttttttttttgcgttttgttgttggtttaatttattactgtttgacatccagtgacactgacataccctcgccgggcccccggcgagtctgacctgtccaataaaatacagtaggaggagtggacggtgacgcacatgcatccacacttaactacagtgactccaaactgcggcgcaacagtactgccagcaacggaaaagaaaaacaggtatcgtgtgttccccaattcggaattctctctctctctctttaagacagttaatgctgttacagatgctactgatgccaggacagggccagtcacaaacagtcctacagcttctctgctgtataaatatggaagattcttttgtttatacagttttactccaagtctgaaactacatctgctgctacccgttactgctaaggcctatgccatctcagctctggaacgaggggctcggggtcgagactggaatgtcggggctcagtcttcttcgctgccacttcctgagcggtcctcctcttgttcctcctcactgtcatcgtcactcacgaccggcttggctcgggaccctcggctcggccgccgccggccgcccttcagccggtcctgtgccttctccttccggccaagcttgatcttcactttgacggaccgagattcggattcggagccttcctcctcgccctcttcctcctcctcactctcctcgccttcactgtcatcctccttctcgattttctgccgcacgctggtgaagaccgactgcaagacgatggagtcttcatagatcagggagccctccaggttgaaggtctgtgcgttctggcacaggagcatgacgtccttctctaggtcgttgaggctgcggtacttgtggttgcgaatgcgctcctttatcttcttgaagtccacgggcttgcggatgagctcgtagtactcgggcagctcctttcgcgagggcagctggatgaagacctcgctgagctgacgtccactgctgctgtccttgtacttgatcacggcatccacaatcttcttcatcttcttggtgaggttgggtgggttaggggagagtttctcggcag

SEQ ID NO: 369 - DNA, 1119 bp, Homo sapiens
gccaggacacaaggtctcctttccccgctcggctggccggatacaaatgtcacccccgaagctgcctggaagttccagctccgagttccctgggaggactttttcagatgttagggacccgctccagagccccctctgggtcaccctgggttcctccagccccaccgagtcactcactgtggaccctgcctctgaataatcaggaacggtggcttcagagacgtctcttgggccttccctctggccacgtctgcacccacccctcctgggcaccctcctagcctgccatccctcacctgcagccaggctctcagggaaggtccatgctgcttggcctgagttcaaggctttctgcctgtagcctggactcccgtggacccccgtgggcaggtggcttccccgtggcatctccacaccgcctctgcctgcccctgtggactgatgctatcgcgcaccgtcccacgaccccaccccgagctcctgaagccggggtctgagcctgcatcacctctggcctctcatcccccactctcctgagagcagtggtcacagcggccggccgctctgctgagaaggcagagaggcaggctcaggcctcagcgtggacagcagggataaggggcacgaaggacggggactcggccccttcagaattcctcaggactctcaggtgcagctttgccaaaaaggaacttttcatgtcatgcagttgaggggacttagtctcaatcccaggctcctcttgactctgggcagctttaatcaggttgggcagcctctgctacagcgtggagtgggatggctctcttccctcagccacgccgcttgtgaggacagaggtgggggagtgggaagtgggaagtcaccagagaacaggagagggatttgagggcgagaccccagcgctctccacggaccagccagagggactggagccaggtgtgcatgggttcaaggccctggccctgcccagcctctgtcttgggagctcagccccagggttcggtcgtcagcagtttcccaagaacaagatgtgatggcatctgctgctgaaaccctgatgaggaccaggccccctgcaccgctgtcagcctgaggaattaaagctttggtgctggg

SEQ ID NO: 370 - DNA, 1060 bp, Homo sapiens
ggcggtgcgacagcagctggagggcagaggaggcggcgcggggtgtcctgtcctcgccatgaggccgcagcaggcgccggtgtccggaaaggtgttcattcagcgagactacagcagtggcacacgctgccagttccagaccaagttccctgcggagctggagaaccggattgataggcagcagtttgaagaaacagttcgaactctaaataacctttatgcagaagcagagaagctcggcggccagtcatatctcgaaggttgtttggcttgtttaacagcatataccatcttcctatgcatggaaactcattatgagaaggttctgaagaaagtctccaaatacattcaagagcagaatgagaagatctatgctccacaaggcctcctcctgacagaccctattgagcgaggactgcgagttattgaaattaccatttatgaagacagaggcatgagcagtggaagataaaccgaagaattaaagatcccacttccagccgggcccctcatgtatccactggccgaccgcagagtgtccctacctcctctccagagcatcattcctttctatctgctgccagagccacggtgccatttactccaaggactcactttctaaaattccacacctggagtgacctctagtcgctcagcatccactttgtgtctccaaattgtgtaggactctgtaatcttttgattagtttctgagaaaacacaatgaagcacttcacttttttttattcaaagccatttaataaaacacagttggtcagcccagtgcaaagcttgttatctgccaccagtacataccattggttctcttcattccttgggccagcttctcaggtggctttagacctcaacaagccgtatcttcaccagtgttctatcttgttcccctaaattaataaaatgtttttctccaggattttggtgagggttggctgtggctgtcgttttgcacctcccagatttcaaagaattactggttttaccatgactcaaatcttaagatctgtttctactattcagttcctcaaactgaagcttattg

SEQ ID NO: 371 - DNA, 3344 bp, Homo sapiens
  misc_feature 372,375,1282,1476,1527,1566,1579: n=a,c,g, or t
caattgttcattaagtaaaaggggctggccaatttaggtattcaatacatgtttgctttcaaccacccacccacccacctactggcacaaaggctccaaactctacttgtaaaatctaccaaaaagaaagttactgcattatatttgtgtataaatggtttttacaacatctatatgtgggatttttttttttctgctctctctggaaaaaaattagtttaagccttgcttaagaaaaaagaagctaaagtaaataaatcctgaccaagaacgcatatattctcagtttgttttctgtaagtcaaatgtttagaaatagcaatgtattttcccataaaaacaagttttaagattctcaagccagtgtatggnggnggggccaaaatatatacctaatttgtgttatataaccatcagcatttagcacaaagaattcatttaaatatatatccagagttctaggttgggaagatcttgggagaaataattcccaccaaaattccaggaactagaaaactgggacttactttcaccagccatgactctaatcttctcacccaccaggatgtgagactaaacactgcccgctctcctgtacccctcccatcccaaaccccagactacaaactccaaaagcatgttcatacaatcccttaggacaaggatggaaatagaggtgacaggggagaggaaggcaagaaacttagaagtgtctgaagggtgattttttaaaagtcgaggcactggggtgtgtccatggaattaagaggggtttcctgtcttagttctctcttgtatatgctgaaaaaccaaagcagagtgaggaacaaggactaggtggagaaagcaaggctgaacatggaagcttttctacagttacttctgtgaaagtaactataatttgaaactggattaaattttcccttccccttctccttctcattgctgtactagtattacaaaaagaagctgtgagaaacatctaaaagagttctttgcattgaggcagggtgataatggaccactggaaatgaggtgggaagtaacatcccaaaggggatggtaataactgagaaaataagaaagtatatttaaatccttctactctactctgagttctttaaccacagggttcacctcctgcccaactttgcacctttggtgcctggaaatctggcacacagtaggtggtcaataaatatgtcaaatgaatgaataaatataactgtagtagatgctatattccttatccagatcccacatcataactgaagggcttatnttcctagctattggagtactgctggcagacagccctcagctgtcagccctctttgggaattacctagcaaaaaggagtcacttcggcccaagatcatactccttcctggggcagcttgcatctaatgataggggatataaacgtccagctcctctcaccccaacttgagacaactttgagggaccatctccagnttcagagctctccgtgtgggtaactgaaactgtatcacagtccaacttctnccatggaaatctggctttcttcctttacatggcattggncccaagaggcctncctagtaaatttgctgtgctcagatttccatttcagagtgtctgctttcagggaaattcaacctgaaacaatagtccaaaagaggacctagatttaaaccagctaaggaaaggatctgatttcatattaaaggcagtaaatataaaaaggttttattaaggctaaggaattacctttcttttccagcaatgtatttccattttagctcctttaagtaatcaacagacctagagtactttgaggactgcttcaaaaaagcccacctgttttactaccatctaggcaattaatgataaactgtaccaaattcaatttatctaacttaaaagaatgcaaaaaagaaccattatgaatttagtgtaaacatggtataaagcattgcagagaacagactgcttttcctgtggatgttaatccacatctgacttgataaggaattgtttctccactaaaagctactaaatacattaagcacagtatttttcattatgattaagatagttagaaatgcaatgcttatataaaagtcacttttaaattatgaagagttacaaactaccagatctacttaaggtacaactgaataaaaaataaataaatgaataagtaacaaaaccatttgcttcatctggatacagctccatatgtacttacgctatttggggctcaaataatactttacccttgcaagaatgcttgaggtttacccattaaattgaggctccagacttatttcaagcatataagtatgctttttaaaaattttttttttagaagactacttgccaaattgctacatagcatgattagcactaaccatgctttctaatgccactctataactcttgctcacaactaaaatctgagggttttgccagagtgtacagataccaatatccagctttactatagaggtgaaatgagtggactatatatggaaaaagtccgaatctgtacttcctggaatatggctcaaaaggcatttagcagatgttttatactggattagtgattattaattctatctgtatatatttcagaaaacacacctggatttgaatcatctgctctgtggaaattcaagaagcaggctgagtgacactgaacaccagcatgccctttgccatattacctcatcattatactcttattttctttcaataatgcaaacattaactatgtaatatttcttgcagagacaggatttagaaaccacaagaggatatttatcaaagaaaatggaaacaacagggtgctgagaaaacctggtgctagtacaaatgcacacaaaacattttaaataaaattagtatcagagttgctataattaccttccaccaaatgtttcattaatttaaccctcagcttccttatgttaacataaaagcaatcactcagtacccatctttacctaacactgcttttacttcatctcctgcatgtatttccttgctatttgtttcctattataagaaaacacaggctggatgcagtgtggctcacacctgtaatcccagcactttgggaggccaagggggtgggtcgcttgggcccaggagtttgagatcagcctgggcaacatggtgaaaccccatctccactaaaaatacaaaaattagcctagcgtggtagcgcacactctgtagtcccagcttctcgggaggttggggtgggagaatcacctgaacgtgaaaggtggagggtgcagtgagccagtatcacgccactgcactccagcctaggcagcagagcaagactctgtctc

SEQ ID NO: 372 - DNA, 931 bp, Homo sapiens; identical to SEQ ID NO: 287

SEQ ID NO: 373 - DNA, 1181 bp, Homo sapiens
gtcagggctgagatggagagggccagggcctggcgaggtggagcagtcggcccaggtgtcccagcaattgttgctggaacagggtctggaacccacaggagaggcctgaaggacccagggccctctggctggatgcgtttgcctatcaggacccagaattacttacagacctgtttagggctaggcttggcctctttcttgagctcatctggaggggtgtggcaacactcattcttcatccttattctccctggctgtgggcaacactggtcctcagtgtcaccagatggtcctcctctgtgcccatgacccctcagcagccaaggctggccctgccagataaatgtgtgtgcccatgatcacacccaggggcacaggccacatacgtttccctgaaaaccttgggctccagcctccatcccgtccatgtgggaggaacttgggtcccagcagtgtgtctttcagcaccaagtcatgtttaaaagaccagagagacaagcattttgccaagatcttccagggaagatgcatgtgtgacacattaacattcaaatcaggccagcgcggtgctcatgcctgtcatcccagcactttgggaggccgaggcgggaggatcacttgagcccaggacttggagaccagtctgggcaacacagtgagaccccatctctacaaaaagttaaaaaagaaaaaaaaaagggcacatgtctgtagtcccagctactcgggaggctcacttgagcctgggaggttgaggctgcagtgaggcatgatacgcctctgtactccagcctggttgacagagtgagaccctgtctcaaataagtaaaaataaaattcaaatcggttaccttagtttggaaacttttcaaagaagtagtccacgagaactaccttgaaagagcaaaaccagccaggtgcagtggctcacgcccataatcccagcactctgggaggcccaggtgggtggatctcgtgaggtcaggagttcaagaccagcttggccaacatggtgaaaccccatctctgctgaaaatacaaaaagtggcacatgcctgtaatgccagctactggggaggctgaggtaggagaattgcttgaacctgggaggcagaggttgcagtgagccaagattgcgccattgcactccaatctggggaacaagagcaaaactctgtccg

SEQ ID NO: 374 - DNA, 1336 bp, Homo sapiens
  misc_feature 1075: n=a,c,g, or t
gtatgatcctgaggagtcacaggcatccgggacctttatttcagggcatggctgaggggtttcagttgttgactatcacaagcaggaaaagaatactcaggaaagcaacttagacttcaaggtcctaccacacaagtgtgacacgttcaccaactattggctccaagacactttcagagtgatggtggagagaagcccacaagagcatggagcgttaccaatgccggagatggcgcccagcaggtccttgtgcaggctgttgtccagggtgcttcccttctgcggcgtcaccagcggattcacagctggtagagccagggattcatccttcacagtcatgcccgcgttcacagggaagggtgacacatccctcacattgatccgctggacgttttcaatcagcagaccaaacagaggcaggtagagggtggctatccttgcctgatggctccttgaagcatatctgtcatcaaaagaatgctttatcagcaggttcttgagcacactgatggcgatcagacggacctcccggaactcctggagggctgtccccacctccctcagtaacagtcccaccaagaagtggtttctgcagaactcatctgttaatgagtagtcaagctggaggtcttggtatctttgaatcctgccttttccaaatggcattggtaagttcaacggaatataatgttcatggttgcacactacacggagaaattcaaacttgtattcaaagagggtctttgggtctccaggagcaaaacagctaatgtagttgttgatctgcttgaagacaaagcccctgtccatgaaggtgaaacatctcttgatgaagacagcaaggctatgattcgcgttcttagatgcctctggattatctcgaaacttctgagtgatgtgtggcatcagcatatttacaacggtttccactgcatgatgataggatgcaggaaatctctggtttcgcagcaacttaactttggagttctctatcaaatgctgagccatagatttgatcagtacatcaaagaaaaaccatgagtacttcagtagtttgttgctggtgaggaaatcngcagaaggcttgagaatcgtggtcatggatttggtcagttcttcatgcactgtcttgtattcagaggcaacatatggctcagccttatacgcgtacttaacatatgacctcaagtggctctccaatccttcctcatggcactgggcaaccacatgaataatgacccgagtcacgttaaccgcgacttcttcctgtgtggctctggtgaggactcggaacagctggtttaggatagtgggcaagaaggcggaaccttagaaa

SEQ ID NO: 375 - DNA, 1409 bp, Homo sapiens
  misc_feature 1372: n=a,c,g, or t
gttcaccgtacttcggtgcacgtttgcagacctggtgggaagaggggcatcttagagccgagacccattcactcttggcactccaggtggagctgggcctttggggcctggatatatccagggctgcggattttccccccttcaggtttaaatgttcctgtttttctacctttccctcgcagtatacgctcaacggcaagaaagtggaagttgccgtcaaacagatcatcgctggaaaagccgtggagcaaggaggtgctttctcgaaccccgagaccctggatctgtaccgggacatccctgagctgcagggcttctgagtcagactggctggcgtgtcactcagccgcacccgtgtgcactgtaacttttgtgtgctcaagaaattatacagaaacctacagctgttgtaaaaggatgctcgcaccaagtgttctgtaggcttggggagggatcgtttctctgttttgttaaatctggtgggtacctggatcttccacacgagtgggattctggccttcagagaccaggagggagtgtctgggccgcagtgtggcactgtggtgagagtgtgtgtctttgcacacacagtgcagcgggaacggtggggctggctggtgctgaagacagacacactcctgagccaaggtcttgtcttcaacctccccgtcccgttgtcccattttgctctgtgaaggtgcaaatccctttcttcccttcccatctcaggctctcctgttttccctcagggtccagtatgcctttgagctttagctgttagaaaggaacccccgtgacttgacacagctttcacagctggctgctaggaccggcgggctgggtgttcacgtgtgtctgtgtcatggatgcaatgcgggccctggaggactgtgcgtcacccgtcaaccagagcgtgcctccgggccagcttccctccaaggaatgagtggatttcatacaggatctctttattgcacagactgaatggctttacatgtttctaatgtgaattaggcatgtgaagcagtgggtgtccacccgtgtccctcatgggtgagccctccagctgtgagcccaggcagtgtggtcaccgagtgaggaccctcctcaccaggaaccgcatccctgtgctgcctccacctgagagttgctagggggttcttgtcgagatcatgtcatcagcacccctaagtcaagtcacgggtttccatagccaggcagttggtatgtacaattcagttcagcgtatgaacttgtatctctaatctgatgtccatttttatattttttgaaactgagcacaatgaaatcctttcttgaatcattttccttttggattataaaaatatgggggaaagtgctatgatgaatnttatgcaataaatgtatacatgtgtgcacatgcaccc

SEQ ID NO: 376 - DNA, 1016 bp, Homo sapiens
cacccccctgtctcctccaggccccggagacgtcttcttcccatccctggaccctgtccctgactctccaaactttgaggtcatctagcccagctgggggacagtgggctgttgtggctgggtctggggcaggtgcatttgagccagggctggctctgtgagtggcctccttggcctcggccctggttccctccctcctgctctgggctcagatactgtgacatcccagaagcccagcccctcaacccctctggatgctacatggggatgctggacggctcagcccctgttccaaggattttggggtgctgagattctcccctagagacctgaaattcaccagctacagatgccaaatgacttacatcttaagaagtctcagaacgtccagcccttcagcagctctcgttctgagacatgagccttgggatgtggcagcatcagtgggacaagatggacactgggccaccctcccaggcaccagacacagggcacggtggagagacttctcccccgtggccgccttggctcccccgttttgcccgaggctgctcttctgtcagacttcctctttgtaccacagtggctctggggccaggcctgcctgcccactggccatcgccaccttccccagctgcctcctaccagcagtttctctgaagatctgtcaacaggttaagtcaatctggggcttccactgcctgcattccagtccccagagcttggtggtcccgaaacgggaagtacatattggggcatggtggcctccgtgagcaaatggtgtcttgggcaatctgaggccaggacagatgttgccccacccactggagatggtgctgagggaggtgggtggggccttctgggaaggtgagtggagaggggcacctgccccccgccctccccatcccctactcccactgctcagcgcgggccattgcaagggtgccacacaatgtcttgtccaccctgggacacttctgagtatgaagcgggatgctattaaaaactacatgggg

SEQ ID NO: 377 - DNA, 1528 bp, Homo sapiens
cagtatctaatttacactaatacatttatgctgaaacctgtaccttaaaacatttttaaataggtatattgagatcttcagaagtagcaggagtgaaatcaaaggattttatgatccaccaagaagattgctgggacagcgaccgggaccatatgatagaccaataggaggaagagggggttattatggagctgggcgtggaagtatgtatgacagaatgcgacgaggaggtgatggatatgatggtggtatgtgtatctaatgaacaaaggttctgttgtcattttcttaatgttcctgacactttgtcaagaaatacagaaatggcagtaatttcagtacctattaggttttaaaacctgttcatgaaaatacggattcccatggctagctgtgggacttgactgatgcacatattggcacctagaaaacttacacagaaattaaaaataagatgttggcatattttgacctttttttgcctaaggatgaaatttaatttacatgtctgaacttaattaactttctgagattttaaatttccatcacgttgactgcttttttcataggttttaagttgggaattgcaaacttgcaatcaagttacacagactgttaccacaaaatgtttttgtaaactaaattataaaatttatctctggaaagtgtgtagtcatgtgtttctccttaaattacacaggttatggaggttttgatgactatggtggctataataattacggctatgggaatgatggctttgatgacagaatgagagatggaagaggtatgggaggacatggctatggtggagctggtgatgcaagttcaggttttcatggtggtcatttcgtacatatgagagggttgccttttcgtgcaactgaaaatgacattgctaatttcttctcaccactaaatccaatacgagttcatattgatattggagctgatggcagagccacaggagaagcagatgtagagtttgtgacacatgaagatgcagtagctgccatgtctaaagataaaaataacatgcaacatcgatatattgaactcttcttgaattctactcctggaggcggctctggcatgggaggttctggaatgggaggctacggaagagatggaatggataatcagggaggctatggatcagttggaagaatgggaatggggaacaattacagtggaggatatggtactcctgatggtttgggtggttatggccgtggtggtggaggcagtggaggttactatgggcaaggcggcatgagtggaggtggatggcgtgggatgtactgaaagcaaaaacaccaacatacaagtcttgacaacagcatctggtctactagactttcttacagatttaatttcttttgtattttaagaactttataatgactgaaggaatgtgttttcaaaatattatttggtaaagcaacagattgtgatgggaaaatgttttctgtaggtttatttgttgcatactttgacttaaaaataaatttttatattcaaaccactc

SEQ ID NO: 378 - DNA, 1767 bp, Homo sapiens
ctttcaagcttttcacccttccctacaggccggggtttgaagtctcacgcctacattcacagtgtccagtttagccaccatgttttcctcaacctccacaccctcaagttttactgccttccagacaactatgagatcatcgattcctcattggaggatatcacgtatgtgttgaagcccactttcacaaagcagcaaattgcaaacttggacaagcaagccaaattgtcccgggcatatgatggtaccacttacctgccgggtattgtgggactgaataacataaaggccaatgattatgccaacgctgtccttcaggctctatctaatgttcctcctctccggaactactttctggaagaagacaattataagaacatcaaacgtcctccaggggatatcatgttcttgttggtccagcgttttggagagctgatgagaaagctctggaaccctcgaaatttcaaggcacatgtgtctccccatgagatgcttcaggcagttgtactttgcagtaagaagacttttcagatcaccaaacaaggagatggcgttgactttctgtcttggtttctgaatgctctgcactcagctctggggggcacaaagaagaaaaagaagactattgtgactgatgttttccaggggtccatgaggatcttcactaaaaagcttccccatcctgatctgccagcagaagaaaaagagcagttgctccataatgacgagtaccaggagacaatggtggagtccacttttatgtacctgacgctggaccttcctactgcccccctctacaaggacgagaaggagcagctcatcattccccaagtgccactcttcaacatcctggctaagttcaatggcatcactgagaaggaatataagacttacaaggagaactttctgaagcgcttccagcttaccaagttgcctccatatctaatcttttgtatcaagagattcactaagaacaacttctttgttgagaagaatccaactattgtcaatttccctattacaaatgtggatctgagagaatacttgtctgaagaagtacaagcagtacacaagaataccacctatgacctcattgccaacatcgtgcatgacggcaagccctccgagggctcctaccggatccacgtgcttcatcatgggacaggcaaatggtatgaattacaagacctccaggtgactgacatccttccccagatgatcacactgtcagaggcttacattcagatttggaagaggcgagataatgatgaaaccaaccagcagggggcttgaaggaggcgtctagggctttgctcccaagggctgtggctgatgatggtaaataagaacacagaagctgtagctgaacacaggctggctggtgggcttcctaggccagcccagcttgtatgggttctggctacaccagagcaccaagagcccacttgcctgggatggccccacactgtcactcagctgttctttgatcatttttttctagattgatgctcctttctcccatgcattgagctcccatctagcttcagcagggcagaacccttctccagatgtgtgtaacttatgtcttgagtatctgggagtagttgaagaacagataattccttccaaacatcaagccttgggattcttggagcaagcagaaagccagtaacttcgctctgttagaggtggaggattttcctatggttccccccatttcctgatttgtatttttagatggattaaatagtctcctgtttttaaacc

SEQ ID NO: 379 - DNA, 1191 bp, Homo sapiens
ataattaatagttgtttttatttttgtttaatacctagttaactcttgattctttgggatcaaattattgaattctgggttgtccaaggctttttttttttctgcccccagcctgcctcttgtcagattgagtaaaggaagataatgacaggatatgcaaatcagccagtttggctatggttaacactgctgggtcaaactataaaaaataaagattgagaattatctgagtattttgtttatacagactttcagttacctatattaatgtgggcattagtcaagagttaactatgtttgaatttactcatttcttaaaaaaaagtaaaaatgtgcacctatggataagtcctaactgacctgtattttcttctgttattttctcttccccacagcattttgattgagatgtcatatggaagtgatacattgttgctctgagttagtagggtagaattgttcagaatttgtgatggatattgtaatggattgaaagagtgacacttcaaagtttgtttcattttggcagaaatactgttttttttcctccctgtagtgggttgtatcccctgcagaaaaagctaaatatgatgaaatcttcctgaaaactgataaagatatggacggatttgtgtctggattggaggtccgtgaaatattcttgaaaacaggtttaccttctaccttactagcccatatatggtaagactttatttgaattgattttttaaaaatatggttttgtatcaattccagtttctgcattttgatttttagtcatttgtaaataggacagtttttgtttcagaattttttatagagaaaatcagaatctgaagaattcttctggctaatggacaaaagcttgagaatgggttacctgaagctttataagattgacagcatccgctgggcatggtggctcacgcctgtaatcccagcactttgggaggccgaggtgggtggatcacctgaggtcgggagtttgagaccagcttggctaacatggtgaaaagctgtctctactaaaaacacaaaaaattagccagacatggtggtgtgcgcctgtagttccagctactcgggagggtgaggcaggagaattgcttgaacctgggaggtggaggttgcagtgagctgagatcacgccattgcactccagcctgggcaacaagaatgaaactccatctc

SEQ ID NO: 380 - DNA, 1187 bp, Homo sapiens
aaagtctgcttctgattcttctggaaaacagtctactcaggttatggcagcaagtatgtctgcttttgatcctttaaaaaaccaagatgaaatcaataaaaatgttatgtcagcgtttggcttaacagatgatcaggtttcagggccacccagtgctcctgcagaagatcgttcaggaacacccgacagcattgcttcctcctcctcagcagctcacccaccaggcgttcagccacagcagccaccatatacaggagctcagactcaagcaggtcagatgtaccaacagtaccagcaacaggccggctatggtgcacagcagccgcaggctccacctcagcagcctcaacagtatggtattcagtattcagcaagctatagtcagcagactggaccccaacaacctcagcagttccagggatatggccagcaaccaacttcccaggcaccagctcctgccttttctggtcagcctcaacaactgcctgctcagccgccacagcagtaccaggcgagcaattatcctgcacaaacttacactgcccaaacttctcagcctactaattatactgtggctcctgcctctcaacctggaatggctccaagccaacctggggcctatcaaccaagaccaggttttacttcacttcctggaagtaccatgacccctcctccaagtgggcctaatccttatgcgcgtaaccgtcctccctttggtcagggctatacccaacctggacctggttatcgataaggaggctcctctacaccaattaatgtagctgctagctattggcctcccaaaagactccagtactattttaatttgtattgaagaagttcagaaatttaaaagcagagcattttttatgatatcattgttggtgttaattgaaagtataatttgctggaacacaaagaccaaaatgaaagttttttcctccctgcttaaaaatgtagcagcttcttagttactttggaacactactcttacatgtataaagtgattgacttgactttctagcttcccttgtccggaggatattaaaatgcttgggtgaggtttagccatcttacttggctttttactattaacatgatgtactaaagtagagccctttgagaatacaagatattatgtataaaatgtaacactgatgataggttaataaagatgattggatccc

SEQ ID NO: 381 - DNA, 1515 bp, Homo sapiens
  misc_feature 1393: n=a,c,g, or t
gcgcattggacttcttgaccctcgctggctggagcagcgggatcgctccatccgtgagaagcagagcgatgatgaggtgtacgcaccaggtctggatattgagagcagcttgaagcagttggctgagcggcgtactgacatcttcggtgtagaggaaacagccattggtaagaagatcggtgaggaggagatccagaagccagaggaaaaggtgacctgggatggccactcaggcagcatggcccggacccagcaggctgcccaggccaacatcaccctccaggagcagattgaggccattcacaaggccaaaggcctggtgccagaggatgacactaaagagaagattggccccagcaagcccaatgaaatccctcaacagccaccgccaccatcttcagccaccaacatccccagctcggctccacccatcacttcagtgccccgaccacccacaatgccacctccagttcgtactacagttgtctccgcagtacccgtcatgccccggcccccaatggcatctgtggtccggctgcccccaggctcagtgatcgcccccatgccgcccatcatccacgcgcccagaatcaacgtggtgcccatgcctccctcggcccctcctattatggccccccgcccaccccccatgattgtgccaacagcctttgtgcctgctccacctgtggcacctgtcccagctccagccccaatgccccctgttcatcccccacctcccatggaagatgagcccacctccaaaaaactgaagacagaggacagcctcatgccagaggaggagttcctgcgcagaaacaagggtccagtgtccatcaaagtccaggtgcccaacatgcaggataagacggaatggaaactgaatgggcaggtgctggtcttcaccctcccactcacggaccaggtctctgtcattaaggtgaagattcatgaagccacaggcatgcctgcagggaaacagaagctacagtatgagggtatcttcatcaaagattccaactcactggcttactacaacatggccaatggcgcagtcatccacctggccctcaaggagagaggcgggaggaagaagtagacaagaggaacctgctgtcaagtccctgccattttgcctctcctgtctcccaccccctgccccagacccaggagcccccctgaggctttgccttgcctgcatatttgtttcgctcttactcagtttgggaattcaaattgtcctgcagaggttcattcccctgaccctttccccacattggtaagagtagctgggttttctaagccactctctggaatctctttgtgttagggtctcgatttgaggacattcatttcttcagcagcccattagcaactgagagcccagggatgtccnacaggatagtttcatagtgacaggtggcacttggctaatagaatatggctgatattgtcattaatcattttgtaccttgacatgggttgtctaataaaactcggacccttcttgtggaatct

SEQ ID NO: 382 - DNA, 2646 bp, Homo sapiens
tgtggacaaagtggactcttagaaaactgtatggaaatgcactgatatagacctccagaagtcttgtattgttggaggaaaaagaaaaagtcatggaacatcctttagtattgactgcaatgtctgtacttgttttgctggcaatttggtgtgctctacccgcctttgcctcagtgagcacagttcagaagatgaccgtcgtaccttcacaggtctgccctgtaactgtgcagatcagtttgtccctgtatgtgggcagaatgggcgcacttaccccagtgcctgcattgctcgctgtgtgggcctccaagaccatcagtttgagtttggatcatgcatgtcaaaggatccatgtaatcctaatccctgccaaaaaaaccaaaggtgcatacccaaaccacaggtctgcctgacgacttttgataaatttggatgtagccagtatgagtgtgtaccaagacagctcgcgtgtgaccaggtccaagatcctgtttgtgacacagaccacatggagcacaacaatctctgcactttataccaaagaggaaaaagcctctcttacaaaggtccctgccagcccttttgcagagcaaccgagcccgtatgtgggcacaatggtgagacctacagcagtgtgtgtgctgcctactcggatcgcgtggcagtcgattactatggggactgccaggccgtcggagtcctctcagagcacagctccgtcgccgagtgtgcttctgtcaagtgtccttcgctcttggcagctggatgcaaacccatcatcccaccgggtgcttgttgcccattatgtgctgggatgttaagagttttatttgacaaagaaaaactggatactattgctaaggtaacaaataaaaagccaataacagttctggaaatacttcagaaaatccgcatgcacgtgtctgtcccacagtgtgatgtgtttggatacttcagcattgaatcagaaattgtgatcctgatcattcccgtcgatcactatccaaaagctctgcagattgaagcctgcaataaagaagcagagaagattgagtcccttatcaactctgacagcccgactttggcgtcccatgtccctctctctgccctcatcatttccaggtacaggtcttcagcagtgtgccatcggccggtgtcagggccaggccttcttgccactcccttcttctttccctcacttgggccttgccttgcacttgctctggacatataactgactgcccacggaaagtgcagaatgctcctccacctcactctcctgccttgaaaaagacattcaggactgctggtttgtagttgaatattggccaaggaaaggcacatgtcacctctattcgccacacagtatttttttttttaatccgccaatattagtaggatttttgttttgtttttacaaatgttaaaatgtgttgttccaaatactaatgaaaacagaatgtctcttcctggtagaccactgccatatgatttacatttcctcaccataagggtcccccactctaaagcaaatttatcgctgggaaatgagatgaccactttttagaaagataattcactggactatcaggttcacaaacttcatttcagagttctttttgaagtatttaaggttcccgttgcatttgttttgtttacagataattacctactctggctagaagctaggggtcccagtgaagagccactgccattaaagaatatgaaacatagataaaacatctttgaaattatgtaaattatgtaaattatcaggcaaatttgcattaaattacagaaatttaattcagaaccccaactactgtgttatgcaaaagcaagctgattaaatgacactcatataattatatgttgtaagcaacaggctcactggtcacggatttgtgtctgtgacttttgtgaaagggagaagtgacattgcatcaaagcatcttgcattatgcaatttttatattaaccagatatatattcatcggtattcatccaagttaaatgtagagtttttaaacatcaatctttaaaccaattgctgctacttatataattgccaaaaagtgaaataatgtgtagttcatgtaaataatacattatatttctattttattatgaagaaggtgaatagccatatttgtaaatgacaatcatgtgtgttaacccagtgctttccattcgtgaaaacacatttgctttttgtgatatgcacaatgtagataagtgttctgtctgactttcttttttgatatagaagtataaagaattgtggtttatatatttaaaagtgtcaagctgagtattaaaatgtatgcatgttgtctaagaaattgaatactttgaatgtgtttcacagtttgaaataagctatttgatgtaatacttcttgtgtgtatgcacatgaacttagattttacatgaagtattttttcagtattatatgtaccctctgaaatacatagggatatgcgtattataccaaaatgttgctgaaaaatgggcacttaaagctttcagaatatgtcagtgctgatgtagcatgcttgttgcaattgccttttttctgtataaatgtctttaatgcaatatactggaaagcttttctattttaataaaaataatttttatatgacc

SEQ ID NO: 383 - DNA, 1319 bp, Homo sapiens
cggggctccggagccgctcgctcccgacacggctcacgatgcgcggcgagcagggcgcggcgggggcccgcgtgctccagttcactaactgccggatcctgcgcggagggaaactgctcagggaggatctgtgggtgcgcggaggccgcatcttggacccagagaagctgttctttgaggagcggcgcgtggccgacgagcggcgggactgcgggggccgcatcttggctcccggattcatcgacgtgcagatcaacggtggatttggtgttgacttctctcaagccacggaggacgtgggttcgggggttgccctcgtggcccggaggatcctgtcgcacggcgtcacctccttctgccccaccctggtcacttccccaccggaggtttatcacaaggttgttcctcagatccctgtgaagagtggtggtccccatggggcaggggtcctcgggctgcacctggagggccccttcatcagccgggagaagcggggcgcgcaccccgaggcccacctccgctccttcgaggccgatgccttccaggacttgctggccacctacgggcccctggacaatgtccgcatcgtgacgctggccccagagttgggccgtagccacgaagtgatccgggcgctgacggcccgtggcatctgcgtgtccctagggcactcagtggctgacctgcgggcggcagaggatgctgtgtggagcggagccaccttcatcacccacctcttcaacgccatgctgcctttccaccaccgcgacccaggcatcgtggggctcctgaccagcgaccggctgcccgcaggccgctgcatcttctatgggatgattgcagatggcacgcacaccaaccccgccgccctgcggatcgcccaccgtgcccatccccaggggctggtgctggtcaccgatgccatccctgccttgggcctgggcaacggccggcacacgctgggacagcaggaagtggaagtggacggtctgacggcctacgtggcaggctgcagcatggagtcggccctggaggctgcatccctgcaccccgcccagttgctggggctggagaagagtaaggggaccctggactttggtgctgacgcagacttcgtggtgctcgacgactcccttcacgtccaggccacctacatctcgggtgagctggtgtggcaggcggacgcagctaggcagtgacaaggacctcggctgagaggacacctggccgcagcgggatgccatcagggccgggtggttggggagctggtctccagggagtgagtcgggagccctgctggattgatgcccagggcctgt

SEQ ID NO: 384 - DNA, 1386 bp, Homo sapiens
tctaagtgacagaaggaatggagaccctcttgggcctgcttatcctttggctgcagctgcaatgggtgagcagcaaacaggaggtgacgcagattcctgcagctctgagtgtcccagaaggagaaaacttggttctcaactgcagtttcactgatagcgctatttacaacctccagtggtttaggcaggaccctgggaaaggtctcacatctctgttgcttattcagtcaagtcagagagagcaaacaagtggaagacttaatgcctcgctggataaatcatcaggacgtagtactttatacattgcagcttctcagcctggtgactcagccacctacctctgtgctgtgaggccctatgggaacaacagactcgcttttgggaaggggaaccaagtggtggtcataccaaatatccagaaccctgaccctgccgtgtaccagctgagagactctaaatccagtgacaagtctgtctgcctattcaccgattttgattctcaaacaaatgtgtcacaaagtaaggattctgatgtgtatatcacagacaaaactgtgctagacatgaggtctatggacttcaagagcaacagtgctgtggcctggagcaacaaatctgactttgcatgtgcaaacgccttcaacaacagcattattccagaagacaccttcttccccagcccagaaagttcctgtgatgtcaagctggtcgagaaaagctttgaaacagatacgaacctaaactttcaaaacctgtcagtgattgggttccgaatcctcctcctgaaagtggccgggtttaatctgctcatgacgctgcggctgtggtccagctgagatctgcaagattgtaagacagcctgtgctccctcgctccttcctctgcattgcccctcttctccctctccaaacagagggaactctcctacccccaaggaggtgaaagctgctaccacctctgtgcccccccggcaatgccaccaactggatcctacccgaatttatgattaagattgctgaagagctgccaaacactgctgccaccccctctgttcccttattgctgcttgtcactgcctgacattcacggcagaggcaaggctgctgcagcctcccctggctgtgcacattccctcctgctccccagagactgcctccgccatcccacagatgatggatcttcagtgggttctcttgggctctaggtcctgcagaatgttgtgaggggtttatttttttttaatagtgttcataaagaaatacatagtattcttcttctcaagacgtggggggaaattatctcattatcgaggccctgctatgctgtgtatctgggcgtgttgtatgtcctgctgccgatgccttcattaaaatgatttggaagagc

SEQ ID NO: 385 - DNA, 2680 bp, Homo sapiens
ggccgtctggcttgcccagtggctgggccctctgctcttggtttccctctggggactcttggctccagcctcccttcttaggcgcctgggtgagcacattcagcagtttcaggagagctctgcccagggcctgggcctgagcctggggccaggtgctgcagccctcccaaaagtggggtggctggagcaactgctggaccccttcaacgtgtccgacagacgatccttcctacagcgttactgggtgaatgaccaacattgggttggccaggatggacccatattcctgcatctagggggtgagggcagccttgggcctggctcagtgatgagaggccatcccgcagccttggccccagcctggggcgccctggtgataagcctggaacacagattttatggcctgagtatacctgctggaggcctggaaatggcccagctccgcttcttgtccagccgccttgcgctggctgatgtggtctctgcccgcctggcactttcccgcctctttaacatctcctcctccagcccctggatctgcttcggaggctcctatgccggctccttggccgcctgggcccggctgaagttcccccatctcattttcgcgtcggtcgcctcctccgccccggtgcgggccgtgctggatttctccgagtataatgacgtggtatcccgaagcctaatgagcaccgcgatcggcgggtccctggagtgccgggcggcggtgtccgtcgccttcgctgaagtggagcggcggctgcgctcgggtggggcggctcaagcagcattgcggacggagctgagcgcttgcgggcccctgggccgcgctgaaaaccaggcggagctgttgggggcgctgcaggcactggtgggaggtgtagtgcagtatgatgggcagacgggagcgccgctaagcgtgcgacagctctgcggacttctcctcgggggcgggggcaaccgcagccactccacgccctactgcgggcttcgtcgggcggtgcagattgtcttgcacagcctgggccagaagtgtttaagcttttcccgagcagagacagtggcacagctgaggagcacagaacctcaactgtctggtgtgggtgaccggcagtggttgtatcagacatgtaccgagttcggcttctatgtcacctgtgagaatcccagatgtcctttctcccagctcccagcactgccctcccagctagacctatgtgagcaggtgtttgggctctcagccttgtcagtagcccaggctgtggctcagacgaactcctactacggtggccagacccctggggctaacaaagtgctgtttgttaatggggacacagacccctggcatgtgctaagtgtaacacaggctttaggatcctcagaatcaactcttcttatccgcactggctcccactgcttggacatggcacctgagaggccctcagactcccccagcctccgcctagggcgccagaacatcttccagcagctacagacctggctcaagctggcaaaggagagccagattaagggtgaagtctgaatctcataccctttccactccctgcatggtcacctcagtcctggacatacttgttcactgaacaaaagaaagcagcttgttttgaaagaagaaactcccaggaattggaattcagcacctgttccgcacgtaattggcatgtgtctgcaaacatccttattcccaacttaaagtgctttattgcagagagttatggaaatataagaggatgattattctcattgaaatattggtattttgaatgttaaatgtcaaacaaatgtgacttatgctggtgccctcgccctgctgatcagattgtggttcaaattctgccactccagctcctgggttaggggctctgcagtaagtttctttttctggactttagatcctgaacctgtccttgcttctcagtttctctcactgtacccctttccctcagtctcttcctctctctttcccctgtcactatttgtctttctaatctccttctgtttctctgaatatcttcatttctatctctgtgtttctgtctatttctctgtttatctttctgtccttcaatctgtgtttttgtttctggctctccgtcagtgtctttttctctcctctctctcttgctctgccatggctatttccactgctctatttctgactctcatttttggtctctgtgtgtctcctagtcactttctttctcactctgtctctgtctctatttctgtctctcctctgctgtgtcctcaatctctctgtctccctgaggctctatttctgtctctcctctgctgtgtcctcaatctctctgtctccctgaggctctatttctgtctctgatgctcttcttctgtgtctctatttctcttcctgtcacttaatcttttccttctctatctctcttatttagtcttccttccacacccttcactcaccatcttttcccacaatcaaatatcactccctggtacttccagcttccaactctagggattcatgattctggtggagattccttcttccagggcctgggaggatagggctaatcccaagggtgcctgcttaggctatgttagctgtgacaggaacctgccatagatttgcactgttctttcctaaagatcaattattttcagcaataaatacttctcagctttt

SEQ ID NO: 386 - DNA, 2076 bp, Homo sapiens
atcgtgagggtactgaaactttcgctgaccaccgggagggcatcctgaagactgcgaaggtgctggtggaggacaccaaggtcctggtgcaaaacgcagctgggagccaggagaagttggcgcaggctgcccagtcctccgtggcgaccatcacccgcctcgctgatgtggtcaagctgggtgcagccagcctgggagctgaggaccctgagacccaggtggtactaatcaacgcagtgaaagatgtagccaaagccctgggagacctcatcagtgcaacgaaggctgcagctggcaaagttggagatgaccctgctgtgtggcagctaaagaactctgccaaggtgatggtgaccaatgtgacatcattgcttaagacagtaaaagccgtggaagatgaggccaccaaaggcactcgggccctggaggcaaccacagaacacatacggcaggagctggcggttttctgttccccagagccacctgccaagacctctaccccagaagacttcatccgaatgaccaagggtatcaccatggcaaccgccaaggccgttgctgctggcaattcctgtcgccaggaagatgtcattgccacagccaatctgagccgccgtgctattgcagatatgcttcgggcttgcaaggaagcagcttaccacccagaagtggcccctgatgtgcggcttcgagccctgcactatggccgggagtgtgccaatggctacctggaactgctggaccatgtactgctgaccctgcagaagccaagcccagaactgaagcagcagttgacaggacattcaaagcgtgtggctggttccgtcactgagctcatccaggctgctgaagccatgaagggaacagaatgggtagacccagaggaccccacagtcattgctgagaatgagctcctgggagctgcagccgccattgaggctgcagccaaaaagctagagcagctgaagccccgggccaaacccaaggaggcagatgagtccttgaactttgaggagcagatactagaagctgccaagtccgttgcagcagccaccagtgcactggtaaaggctgcgtcggctgcccagagagaactagtggcccaagggaaggtgggtgccattccagccaatgcactggacgatgggcagtggtcccagggcctcatttctgctgcccggatggtggctgcggccaccaacaatctgtgtgaggcagccaatgcagctgtacaaggccatgccagccaggagaagctcatctcatcagccaagcaggtagctgcctccacagcccagctccttgtggcctgcaaggtcaaggctgaccaggactcggaggcaatgaaacgacttcaggctgctggcaacgcagtgaagcgagcctcagataatctggtgaaagcagcacagaaggctgcagcctttgaagagcaggagaatgagacagtggtggtgaaagagaagatggttggcggcattgcccagatcatcgcagcacaggaagaaatgcttcggaaggaacgagagctggaagaggcgcggaagaaactggcccagatccggcagcagcagtacaagtttctgccttcagagcttcgagatgagcactaaagaagcctcttctatttaatgcagacccggcccagagactgtgcgtgccactaccaaagccttctgggctgtcggggcccaacctgcccaaccccagcactccccaaagtgcctgccaaaccccagggcctggccccgcccagtcccgcagtacatcccctgtcccctccccaaccccaagtgccttcatgccctagggccccccaagtgcctgcccctccccagagtattaacgctccaagagtattattaacgctgctgtacctcgatctgaatctgccggggccccagcccactccaccctgccagcagcttccagccagtccccacagcctcatcagctctcttcaccgttttttgatactatcttcccccacccccagctacccataggggctgcagagttataagccccaaacaggtcatgctccaataaaaatgattctacctgctaggaaaaaat

SEQ ID NO: 387 - DNA, 459 bp, Homo sapiens
gcatttgtagcaatttaaaaataaaatatttaaaattatttaaattgttttggacgcttcaattgtattatatgtgatttacatttcactttttttgttggcgttgttaacccggagagtgctcctgtattgaactttgctgttagttattttattgcttctttttggagagtgctataaaagactattctaatgaaaacattaaaatttacaatttgacatacaaaaaggggttgtccattgattttaaccaatgtagcactgagagagagagaggttaattatagatagacaagagtggtgtttgttgtttttcccctcccagcattgaaatcattggggcttgtcagatgtattaaaaaaagatttgttgtgctattgctgcaaacacttaataactagaggagaatttaaacaatgcattttatattattgtaaccaataaaaaactttctaccc

SEQ ID NO: 388 - DNA, 1341 bp, Homo sapiens
acatttattgtgtcaatgttaagcacactttttaaaagacaacatagaatgtatagaaacaaggggttggggactcatgcgcatttccacaatacaggtaattaggttggctggtttcagaagggccagggcatcactcatgacagcgatggtccacgggccctctctatgggactgattcactgttccaatgtgggtctgtttttttgtttttactttttattaaaaaatataaataaaatggcgctgcaggcctaggctggaaggactctgcaggactctgtcttcgcacaacggcttcttggaggctactgtcagaaaacatcacaaactagcaggatgacagaccacgctgacgtcgactgggcggcacgcgtccaccccacccctgggggcttcaaattttctcagaacttaagggctctcgagcttccatccgaaaactgccacacatcttgagctctctgggtactacgccgaatgggggtgtgtgaagaacccgcggggtcaggggacttccgtgttcgctttctaagtagattcttaatccatgagtgttctgtgcgtgttgcaagagaaaccatgcactggtgaatggctgtttgcaagttgtacatgtgtagctgctgggctcatctttacaaataccctgcggggcatattctgcactcatcccaggcgtggggattagagctccatgtgcagaacgaggggaggagaggcccctccagtgcagaagtttatctgctatgtgttcctgtttggggcaaattcctctagatgacgttgataaacaatcgtcatcctctggcgtgacctggatgccaacctccacgggattggatgcttttttcatctcgattggtgaaggggaaggtggcttatccacagctttttctaagcagaggctgccattgcattgtttccgtttgtgctcgataaaaataagaatgtcccccaatgggaagttcatctggcactgcccacaggtgaggaggtcatgatccccttctggagctcccaacgggccgtggtctggttcatcatctgtaagaatggcttcaagaggctcgggcgagaattcccgtttgcttaagtgctggggtttgccttgcttgcggcgagacatggtgggctgcggggcgggcggcggcggcggcggcggcggcggcgggcggacgacggctcggttcacatcgggagagccgggttagaaagaaggagactccagagaaaatatcttcatcagtgccttttgacatccaaaataaattagaaataatacaaagatggcgcagggaagatgaattgtgggagagccgtcatggcttttttttaagc

SEQ ID NO: 389 - DNA, 891 bp, Homo sapiens
tttttttctatttttttttattaacaagcaacataatcaaaaacaaaaacacaacaaccttaaagctgaaacagcaataagtcaaactgctgccgcagttcatggatgtacctggggtacatgctccctcattgcgaggcaggacgtaggcacatgactgtgcatttaggcatatatgtgaccaagaagaaggagagaaatggaaaacactggagaacagaaagtatcaggaacttttcatcaggcaatcccaaagcgctctgctcttttcctcttctttgcctctgtatcctctgtggttccaagttccagctgaacttgtgacaatcccaaatcgctccttcctctttttcagtttctcatcatcttcagactttctggagattgaagagacattcaaaccaaatctttgagctctttccttcagcttatccaagttaaccataggtttgttatcagatgacagaccttttgttggaactgaagaaatcccaaacctagctgcccgagcagctttcttactctccaagctcacaggtacattgaatcgttcagccctcttctgcattctctcagtctgtggtatttcagatgtaattttcaccactttcttctctgctgccacatcaacagttttttcagggggttcttcctctttgacagggagctcaatgggctttgtttcttcttcctctgtttcatctcccagtacatcttcttcatttgcctcctcttcagcatgttcttcaagatatgcctggagtctgtggataagatcttgctttattcccttggtctccaaaccacgagcaagacattcttgctttagttcggcaagctttagcttatggagctccaccgtctcggtcgccatcttgttacccttagaaa

SEQ ID NO: 390 - DNA, 1966 bp, Homo sapiens
gccagaatctggccgggttctgagcttgttccgcctccctcccccgggaatggcgctatccgggtcgaccccggccccgtgctgggaggaggatgagtgcctggactactacgggatgctgtcgcttcaccgtatgttcgaggtggtgggcgggcaactgaccgagtgcgagctggagctcctggcctttctgctggatgaggctcctggcgccgccggaggcttagcccgggcccgcagcggcctagagctcctgctggagctggagcgccgcgggcagtgcgacgagagcaacctgcggctgctggggcaactcctgcgcgtgctggcccgccacgacctgctgccgcacctggcgcgcaagcggcgccggccagtgtctccagaacgctatagctatggcacctccagctcttcaaagaggacagagggtagctgccgtcgccgtcggcagtcaagcagttctgcaaattctcagcagggtcagtgggagacaggctcccccccaaccaagcggcagcggcggagtcggggccggcccagtggtggtgccagacggcggcggagaggggccccagccgcaccccagcagcagtcagagcccgccagaccttcctctgaaggcaaagtgacctgtggctgtacaagaagcagggtgccagcatctgcttctgttgaggacctccggaagcttccattcatggtggaaggccaaggggagcaggcttgtcacatgacatccggctccgggttcgagcagagtactgcgagcatgggccagccttggagcagggcgtggcatcccggcggccccaggcgctggcgcggcagctggacgtgtttgggcaggccaccgcagtgctgcgctcaagggacctgggctctgtggtttgtgacatcaagttctcagagctctcctatctggacgccttctggggcgactacctgagtggcgccctgctgcaggccctgcggggcgtgttcctgactgaggccctgcgagaggctgtgggccgggaggctgttcgcctgctggtcagtgtggatgaggctgactatgaggctggccggcgccgcctgttgctgatggaggaggaaggggggcggcgcccgacagaggcctcctgatccaggactggcaggattgatcccacctccaagtctccgggccaccttctcctgggaggacgaccatctctacccctagaggactgtcactctagcatctttgaggactgcgacaggaccgggacagcaggccccttgacagcccctcccacaggatgtgggctctgaggcctaaaccatttccagctgagtttccttcccagactcctcctacccccaggtgtgcccccttagcctccggaggcgggggctgggcctgtatctcagaagggaggggcacagctacacactcaccaaaggcccccctgcacattgtatctctgatcttgggctgtctgcactgtcacaggtgcacacactcgctcatgctcacactgcccctgctgagatcttccctgggcctctgccctggcctgcttcccagcacacacttctttggcctaagggcttctctctcaggacctctaatttgaccacaaccaacctgggcttcagccacatcagtgggcactggagctggggtgcacatggggcctgctcaccttgcccacacatctccagccagccagggccctgcccagcttcaatttacagacctgactctcctcaccttcccccctgctgtccagagctgaacatagacttgcacttggatgtcacctggagtgtcacatgggagtgttatggcagcatcataccaaggcctactgttgcacatggggccaaaaccagtaaacagccaccttcttggaaagggaatgcaaaggctttgggggtgatggaaaagaccttttacaaatgataccaattaaactgccctggaaagggcataggtggg

SEQ ID NO: 391 - DNA, 1473 bp, Homo sapiens
ctttcattgaccacattgctggagatgaggatcacacagatggagtagtagcttgtgctgctggactaataggggacttatgtacagcatttgggaaggatgtactgaaattagtagaagctaggccaatgatccatgaattgttaactgaagggcggagatcgaagactaacaaagcaaaaacccttgctacatgggcaacaaaagaactgaggaaactgaagaaccaagcttgatctgttaccattgggatgataacctgaggacccccactggaaatctcccatcttttgaaaaacctggaagtgaggagtgtgcacggatgctgaatgtttgggaatgagaggatgagtgagtgaggcttgaaaacacaccacattgaaaatcctgccacagcagcagccgcagccgccaacagcagcgctgttagtgagctaagtaagcactgacttcgtagaaaaccataacatcggccatcttggaaaagagaaaaacaatggagttacttatttaaaaaaaaagaaagaaagttatctcttcccaggagaggctagaagtagcttttctgtcttttggccagtgccgagtggaatgcctggtttgggggaggaggagggactgggttcagctgtggtgctttgttgtaaaaggcagcctggcctttgctactgaggagaaagatggagcctgggtctcaagcccaccttcgctgtacctttgccacatggtactgtatgcttgccagctagaaggagggtcagggattttttacagtctgagaatgagtgtgtgtgagtgaggcggtatccacattctcaacttcaagtcattgcagtttctttttcccagaaaacaaggggttagatgttgcatttcataaaactaaccgaagttctgtctactgatgcagcacaagagatgttaaaaaaaaaaaaaaaaaaaaaaaaaaaaaaccacacacacagaggaaagacgctctttaggttttgttttgtttttttttttttggttttgttttttgttttttttactctagggaaaacactgacgaatggtcagagctcctatcctgatcttttcatcaaggcgcctttcctaataatatggttcaactgtgaatgtagaagtgggggggaggggggagaaaaagaaaactctggcgttagaggatatagaaaaatataagtacaattgttacaaataacgcagacttcaaaaacaaaaaaatcacaacccaaacaaaccaaaatttaaatgatcagaattggcagcacaaagaaaacgccctctcctgacttgtattgtggcagtctgaacgcccccagaaaattgtgccaaagagtttagaaaaataaatatccaataaaagtaaacacatacacacaaaacagcaaacttcaggtaactattttggattgcaaacaggataaattaaatgttcaaacaatctgataaaataaccatttggaacct

SEQ ID NO: 392 - DNA, 1325 bp, Homo sapiens
  misc_feature 1288: n=a,c,g, or t
atcggtattgcatgaagtcatggaacagcagactctgtccattgcaaaggctgggatcatctgtcagctcaatgcgcgcacctctgtcctggcagcagcaaatcccattgagtctcagtggaatcctaaaaaaacaaccattgaaaacatccagctgcctcatactttattatcaaggtttgatttgatcttcctcatgctggaccctcaggacgaagcctatgacaggcgtctggctcaccacctggtcgcactgtactaccagagcgaggagcaggcagaggaggagctcctggacatggcggtgctaaaggactacattgcctacgcgcacagcaccatcatgccgcggctaagtgaggaagccagccaggctctcatcgaggcttatgtagacatgaggaagattggcagtagccggggaatggtttctgcataccctcgacagctagagtcattaatccgcttagcagaagcccatgctaaagtaagattgtctaacaaagttgaagccattgatgtggaagaggccaaacgcctccatcgggaagctctgaagcagtctgcaactgatccccggactggcatcgtggacatatctattcttactacggggatgagtgccacctctcgtaaacggaaagaagaattagctgaagcattgaaaaagcttattttatctaagggcaaaacaccagctctaaaataccagcaactttttgaagatattcggggacaatctgacatagcaattactaaagatatgtttgagagacactgcgtgccctggcagatgatgatttcctgacagtgactgggaagaccgtgcgcttgctctgaagccttgtgagcaaggaaggctccctgcatgtcctgcttgctgcacgccacatgggtgtggtctgcatctcagttggccgccatcagtgttaatagagcttaaagtcatggtttggctgcataaaaattttcttacttgggttcaatttttgtagtgaagtttctgttttcatttttttcacgttataaataaaaatactatgctggccgggcgcggtggctcacacctgtaatcccagcactttgggaggccaatgtgggtggatcatgaggtcaggagttcaagaccagcctggccaagatggtgaaaccccgtctctggtaaagataacaaaaaattagctgggcttgatggcatgcgcctgtaatcccagctactcggggggttgaggcaggagaatcgcttaaacccaggcggcagaggttgcagtgagccaagatcgcgccnctgcactccagcctcagcaatagagtgagactgtccc

SEQ ID NO: 393 - DNA, 2546 bp, Homo sapiens
ctgatgttttcctatcgtcagcggtgcttttaaggttcccgtttccagttgttcgttggtagcatatagaatttattgaccttgtgttttgcaccttcatgaaactcacttactggatctcaaagctctgtcggttctttggggttttctgcgtggacagcccatgtctgtcagtgggtccgtctctcgtcttccttttcacccctctgtgtacgttacttcctttctcttgcccgctgcatggcctggaacccgcagggagatgtggtggatgtcagggcagaccacggccagccttgagtgagccctgctggtttgtgtgccgtcctcgttcccagtcctgggggacgtctcccctcatgcagacggcaagcacgcacaaagagcgaggaagaactccctcttcctggtctgcgggggctttctcgcagtgggggccgaatttctcagatgctttcgctccgtggttcctctgtgtgtccatacagcgagttacactgagtcattttcagccagcctcgtgttcccaggatatatcttgccgagtcatgtgttatcctcacatattactggattctctttgcagagattatctgtagtattttattatttttttggagacagggtctggctgtgtcacgcaggctggagggcattggcgcaatctcagctcactgcaccctccacctgctgggcttaaggaatcctcgcacctgagccccccgagtagctgggcttccaggcacgcaccaccacacccggctacttttttgtatttttttgtagagatggggtttcaccgtgttgcccaggttggtcttggatgcctgagctcgagggttctccccgcctcggtcccccaacgtgccggaattacaggcgtgagcccccgcccagccttgagtgagctttgctggtttgtgtgtttcggaaacttgcccgttcccatcagtgggttattgttggtatttcctgctcgtgactctgatgtctgcagaatccagtgatagcgtctctcacgctcctgatactgactttgtgtgtgatcagtgaggcgaggggccgacgaggttcactcttcttcccagggaaccacgggtgtttctcccctttgttctgctgttttccttgagtatcttcaggcagcgacgtgggccatggacaccgcagcccgcggccttctgattttggtgcagctcaaaatactttctggttaccgttgggttcccgacccatgggttccatggacgtgcattttaacccctgctcccccatcagccgccccgtccgattcctgccaagcagcacagggcccctgcggcccaccctgggccgtctgtcctgtgtgtccgtcctcctcgtggtcattgtttgcacggtggctctgacctggcagccaacctctgggtccccacaacttcgcagtctctgccttctcctgtcggacaccctaaggcagctgtggcccccagacctagcctggatgggtgtgcgcctgtccccaccaccgtctgtcacctctgctccccacctgaccagtgtccacccccacggctgcccggctttgtgtctgcggcacagccagcagcacgctggggtcgactgccttcaccgtgtccacgcctgctccggcagtgggagctcaggtccgtgggggtgaccgcggggagctcagtgccaggctgtcgggggcgtcttggaaagcagaggtgtccccacaggatctctgagagtctgtgtggtccgtggccgcgctgggttccccggagcagcgcccgacgtcactgccgagaccttaagggaaggcgcgcgtccagtcctcgcactgctgcgtgttctggtcagaacggaagtggtagcctccactgggagcttctgtgctttgggagaatgtgtctaaactgtggtcctgtttgttctccagtcctgtgtggacaccacgacccagttgtaaacacaggtcctgtgcagctcgctttggggaaaaggcgcgcccgcccaggtcctctgtgtgtagctcacgcccggggctccgtcccgtcctgggtgggttttcacctgcaccgcaggcccctcccccgggagcattcgtggagccggcgtcctcagccaggagcgcgttgctggctcagcggctggagctcaaggtcggctcaggggactgtctcgtgctggaggttggcggccgagcagcctgtgtttcccggaaaacggcccagggcctgctccgcgctgctggccacgtcttcgccatcccctcgttgcaggttcgaggccgagctcagccccgtggagcagaagctgagtgcgctgcgctccccgctggcccagaggcccttcttcgaggcgccctcaccgctgggcgccgtggacctgtacgagtacgcgtgcggggacgaggacctggagccgctgtgacgccacccgcgagaacgccgccgcggggccgccccccacgtgccaccaccgggccaccgcggctcgtgtaaaaactgttgtggaaaatgagtgcgtttgtacggaatgataaacttttatttattcac

SEQ ID NO: 394 - DNA, 1432 bp, Homo sapiens
ttttttttttttttaaaatgccaagataagaaacgatttattatagagagaagaaaaatttctcatccaaaatatagaaatctgtacaactttgccacaatcaatatacatgaactgtacaaatttacaccagttcataatttaccaaataaaagatgactaacaaagttcacaaaatagatggtggtttgtggaaaagacttttacccaattaagtacaaggaaagttacaaaccagacctccactttctaaaaataagaagtttactcagtcttagaaaactacaagctagcaaatgtacagagagctggctggtgctaacaccacagttgagacagtgtctttttaagggtcttttttaaagcctgttgccatggcagattctggtcacttgctactttcaaggccaaaaacacaatacaaggtctgaccatttccccaggtcatgcttactagtttgtctttatgtacatttatacatatttaagtgctaggtaaaagtcttgtaaaatttccagtactaccatgtttaaaacgtttaactttcctattaaaagctgccgaaaaggttaacaataacaactttcaagtgtaatagtgcaaattcccctgcgagatttactgcagagaaagattctttgaaatacagattttctttaaaaggattgatgtaaaaatttaggtatgtctgggagaaactgaaaccaccctaggacttccctccctagcaaataaagtgatcatttacttggactcacaggctattaaaattaatcattgaaaggtactgtccaaactatggcactgtcacttaaaattttttttttttttaccattctatcttgtgccagatcttcacagctgtgacatggtttaaattccataatccatccccaagaggagcccacccaaagcaaaaatcaaatttatccatcatcatcagatgatccatccacagactatatcttaacctgatacagtcatcatattgtagtttttggaagggctcgttctgcccaagagaagttcctccttacagctgattcggctgtctaccatttgcacgttggtgctgttttgagtgctacctcctgctggtgaggcttcatacagcacacagatggagccatcctctccaattctgtaggacacttcataggggtcaacccagagtgtgagttcacttgggagaagcctgaacagctcctgactgctcagtccaatccgctgtgctgcctgtccaatcagaggatccattttatggttgatgcgaatacaacggtaacccgatcccttgcatggcttttctgggaaccagtgatgtttataatgttctatagaagaaaagaagaacagagaaacaacgcttaggatcgttagctcccactgcggattcctcctaccccaggctcctttgaggagcgaaaatgt

SEQ ID NO: 395 - DNA, 2431 bp, Homo sapiens
aacaggccatgcatataatgtacagtgtattacgtaaatatgtaaagattcttcaaggtaacaagggtttgggttttgaaataaacatctggatcttatagaccgttcatacaatggttttagcaagttcatagtaagacaaacaagtcctatctttttttttttggctggggtgggggcattggtcacatatgaccagtaattgaaagacgtcatcactgaaagacagaatgccatctgggcatacaaataagaagtttgtcacagcactcaggattttgggtatcttttgtagctcacataaagaacttcagtgcttttcagagctggatatatcttaattactaatgccacacagaaattatacaatcaaactagatctgaagcataatttaagaaaaacatcaacattttttgtgctttaaactgtagtagttggtctagaaacaaaatactccaagaaaaagaaaattttcaaataaaacccaaaataatagctttgcttagccctgttagggatccattggagcattaaggagcacatatttttattaacttcttttgagctttcaatgttgatgtaatttttgttctctgtgtaatttaggtaaactgcagtgtttaacataataatgttttaaagacttagttgtcagtattaaataatcctggcattatagggaaaaaacctcctagaagttagattatttgctactgtgagaatattgtcaccactggaagttactttagttcatttaattttaattttatattttgtgaatattttaagaactgtagagctgctttcaatatctagaaatttttaattgagtgtaaacacacctaactttaagaaaaagaaccgcttgtatgattttcaaaagaacatttagaattctatagagtcaaaactatagcgtaatgctgtgtttattaagccagggattgtgggacttcccccaggcaactaaacctgcaggatgaaaatgctatattttctttcatgcactgtcgatattactcagatttggggaaatgacatttttatactaaaacaaacaccaaaatattttagaataaattcttagaaagttttgagaggaatttttagagaggacatttcctccttcctgatttggatattccctcaaatccctcctcttactccatgctgaaggagaagtactctcagatgcattatgttaatggagagaaaaagcacagtattgtagagacaccaatattagctaatgtattttggagtgttttccattttacagtttatattccagcactcaaaactcagggtcaagttttaacaaaagaggtatgtagtcacagtaaatactaagatggcatttctatctcagagggccaaagtgaatcacaccagtttctgaaggtcctaaaaatagctcagatgtcctaatgaacatgcacctacatttaataggagtacaataaaactgttgtcagcttttgttttacagagaacgctagatattaagaattttgaaatggatcatttctacttgctgtgcattttaaccaataatctgatgaatatagaaaaaaatgatccaaaatatggatatgattggatgtatgtaacacatacatggagtatggaggaaattttctgaaaaatacatttagattagtttagtttgaaggagaggtgggctgatggctgagttgtatgttactaacttggccctgactggttgtgcaaccattgcttcatttctttgcaaaatgtagttaagatatactttattctaatgaaggccttttaaatttgtccactgcattcttggtatttcactacttcaagtcagtcagaacttcgtagaccgacctgaagtttctttttgaatacttgtttctttagcactttgaagatagaaaaaccactttttaagtactaagtcatcatttgccttgaaagtttcctctgcattgggtttgaagtagtttagttatgtctttttctctgtatgtaagtagtataatttgttactttcaaatacccgtactttgaatgtaggtttttttgttgtttatctataaaaattgagggaaatggttatgcaaaaaaatattttgctttggaccatatttcttaagcataaaaaaaatgctcagttttgcttgcattccttgagaatgtatttatctgaagatcaaaacaaacaatccagatgtataagtactaggcagaagccaattttaaaatttccttgaataatccatgaaaggaataattcaaatacagataaacagagttggcagtatattatagtgataattttgtattttcacaaaaaaaaagttaaactcttcttttctttttattataatgaccagcttttggtatttcattgttaccaagttctatttttagaataaaattgttctccttctaaaaaat

SEQ ID NO: 396 - DNA, 1111 bp, Homo sapiens
gctaaatgtctagaagcagagaagtaaagtgagcaaaatccagtgttgaggagtcatgacagtactttgatctttatatactctgaagcatttcttcaaacttttctacttttatttgtcattgatacctgtagtaagttgacaatgtggtgaaatttcaaaattatatgtaacttctactagttttactttctcccccaagtcttttttaactcatgatttttacacacacaatccagaacttattatatagcctctaagtctttattcttcacagtagataatgaaagagtcctccagtgtcttggcaaaatgttctagtatagctggatacatacagtggagttctataaactcatacctcagtggacttaaccaaaattgtgttagtctcaattcctaccacactgagggagcctcccaaataactattttcttatctgcagtattcctccagaagagctaaccagggcagggctggcatgagaagtgacatctgcgttacaaagtctatcttcctcataagtctgtaaagagcaattgaatcttctagctttagcaaacctaagccaaaggaaggaaagccacgaagaatgcagaagtcaaaccctcatgacaaagtaggcacaagtctacaataagctaaatcagaatttacaaatacaagtgtcccaggtagcattgactcccgtcattggagtgaaatggatcaaagtttgaattaaggcctatggtaaggtaacattgctttgttgtacttttgaacaagagctcctcctgatcactattacatatttttctagaaaatctaaagttcagaagagaatgtatcactgctgacttttattccaatatttggatggagtaagttttagggtagaattttgttcagtttggatttaatcttttgaaaagtaaattccttgtttactggtttgactataattctctgttatctttacgaggtaaaactgcaagctgactagcatgttctgtgaatctgccattcctaaaaattttataaacacttgatacttttcactgataatggatcgctccaataaacatatattgtgaaaatgcatccacaataaatggaattccttcctgc

SEQ ID NO: 397 - DNA, 1266 bp, Homo sapiens
ttcccgtggagtggtttgatctatatacactgtgacgatggacagaagaaaattgtgaaagttcaaattcgagaagatttaactcaagtggaacttttaactcgtttgacctccaaaccatttggaattctttccccagtatctgagccttcagttagtcatttggtcaaaccaatgacaaaaccgccttccacaaaagttgaaataagaaacaagagtattacttttcctacaacagaacctggtgaaacttcagagagctgtctagaactcgagaatcatggcaccacagacgtgaaatggcatctgtcatctttagcgccaccttatgtcaagggagttgatgaaagtggagatgtttttagagctacctatgcagcattcagatgttctcctatttctggtctgctggaaagccatgggatccaaaaagtctccatcacatttttgcccagaggtaggggggattatgcccagttttgggatgttgaatgtcaccctcttaaggagcctcacatgaaacacacgttgagattccaactctctggacaaagcatcgaagcagaaaatgagcctgaaaacgcatgcctttccacggattccctcattaaaatagatcatttagttaagccccgaagacaagctgtgtcagaggcttctgctcgcatacctgacaggcagcttgatgtgactgctcgtggagtttatgccccagaggatgtgtacaggttccggccgactagtgtgggggaatcacggacacttaaagtcaatctgcgaaataattcttttattacacactcactgaagtttttgagtcccagagagccattctatgtcaaacattccaagtactctttgagagcccagcattacatcaacatgcccgtgcagttcaaaccgaagtccgcaggcaaatttgaagctttgcttgtcattcaaacagatgaaggcaagagtattgctattcgactaattggtgaagctcttggaaaaaattaactagaatacatttttgtgtaaagtaaattacataagttgtattttgttaactttatctttctacactacaattatgcttttgtatatatattttgtatgatggatatctataattgtagattttgtttttacaagctaatactgaagactcgactgaaatattatgtatctagcccatagtattgtacttaacttttacaggtgagaagagagttctgtgtttgcattgattatgatattctgaataaatatggaatatatttt

SEQ ID NO: 398 - DNA, 1290 bp, Homo sapiens
tttttttttttttatagaaaacctaggtttatttgttaagctattacaaaaacaaaacaattaccatttgaagtactttgaggacttcatcccagactcacttgttctgttacagaaactaacctaaaaggctggaaattaaaggatacaacctaagaggttataacagcagactggtaaaacatggcgaaaggagctctctctttcccccgcagtctaccaagctcctgtgcattttcaccacatagatctgctagcttacaaatgatgcacacagtcaaggtaggaattataggcctactcagagggtacccagacacagaaagttttagggtaaatagtaaactacaaataccctcttggttaagttaattcatcaagttaataaaggtcatattatctatcttctgctggtgacaacttgttgtctcagtatagtctgtctcaagaaagaactggttcaggttgggttttggaaaaggaaaaagactttcattaacttcactccagagtggaagaggcaccaagttctctcctacacttaggagcagaatcttaaacttgcataaatcattttcagtgatcaacatctgcatcctcaaactgtccagcaactgttggtgtggtatccacctccatcccatcttcataatctcttattgaatcttctgtcctgaccccagccatattatactggctgctcacagactgagaaagcattccttctaatctctccagtgtggcttggccttctgctgttagatgggataatccttcttcataggtgtaaaatgtagggatgtccccctgtccttgttcatgtgcttccacatcatattcttctccatcgtagtcatctgaatcctcatcctcaggatctggatgcaaggcctggcattcgcacattgcagtgaacattgcctccaacgctgatttatcactaggcacaaatctaaattcagtaataggttcaacatcatcatcactgtcttcctcttcttcatcagcaacaggttcttttgattcttcttcaaatttggcattcaccataacatacaaatgctctcctagacagtcacttcggtccctggataatgcatgtaaactaatggtggggtattccagtgagaatcctaatccagagccatctaaccaagacaggcggctctcagcgatgtaaagggtaccagtgccgaggcccttcccgttcagcacagcctcagtgtctggctgctgccgcaggagcccctccgctggcccaggcggcgggaaacttttgaggaagcgaaa

SEQ ID NO: 399 - DNA, 1554 bp, Homo sapiens
ttttttttttttttttttttttttcttttcactaattttatttatattaggtagttttcactcagaatatcaattcatttttcaggtttagatatatgtatatgtagctgttcgtatgcattaatcacttagaaactttatttggtataacttcacatttttggtatatagaaattttattttcttaatgcagcacagtagacatacaatcaatattattccctagaatgtgcaatatataaattattcacattaaaaaattaacagaaagcctcatatgcagtaaatatttaaaaatgtatatctaactttgattctgtttctgactatacactactagctttataaatctgaatgaatatgacatttacacatttgaatgaagtacacggatgggtccattccagatgcttattacaccgtatgaataatctgctcttcactttggtcattaaggttccatgtgctgaggcatatagtggatccgaaagacacttccaggaagtacatttattacattggcatcttaagaatttctgttccttttattctcctttatagcgagggggccttttctctttaaaagcaagaagaccttcaagtctgtcttttgttggaatggtctgagcataacaagcttcttctatggctaaccctgttactaaatcgacctccatcccttgattaattgctaattttgccactctcattgcaacaggtccctgaggtaaaaactctctcgccaggtccaaggccttcctgtaggccgcgtctccctcctggttctgttccagaacgtggctgattaagcccactgctttggcttctttgccatcgaggactcgcgcagagaatatgagctccttggccagggacattccaatggcgcgtggcaatcgctgtgtcccccctccaccaggaataatcgccaattttgtttcaaccaggcccatttttgcagaggaagctgctactcgtatatcacaggctaaagccagttcaagaccaccacctaaagcgagtccatctattgctgcaattgttggtactggaagattagcaatatcgttaatcactgctctgattttggagacaaaaggaccaacttcactggaactcattttggctctttccttaaggtcagcaccagcacagaatatccctgggacttcactcctgattattatggtccgtactttcttatcagatttcaaagcatccacagcttttgatagcatttttataagatttttactgagtgaatttttgccataagctctgtttattccaagcaccacaattcctcggttctcctcctccaggtgccgcacccgcagctcgtcctccgtcttcatctcagagctgtagccccttttcggggcgggacccccggccgcaggtacccagccctgggcccagatcgccgggcccgctcgccggcctgccaacgagccgggcagcctcaaccccgggcagagccacgcactgcaagcggccaccaggcgggcgccgccagcatgcagggatcccaaggccccaggtgccgccgccacc

SEQ ID NO: 400 - DNA, 2402 bp, Homo sapiens
gtttcccagaggaacagttcatttcaacagccagggagaaagcctggatgctcaagttggggaatggcggtcaatgtgtattctacctcgataacccaagagactatgagcagacatgacatcattgcatgggttaatgacatagtatctttaaactacacaaaagtggaacagctttgttcaggagcggcctattgccaattcatggacatgctcttccctggctgcattagtttgaagaaagtaaaatttcaagcaaagctggaacatgaatatattcacaattttaaacttctgcaagcatcatttaagcgaatgaacgttgataaggtaattccagtggagaagctagtgaaaggacgtttccaggacaacctggattttattcaatggtttaagaaattctatgatgctaactacgatgggaaggagtatgatcctgtagaggcacgacaagggcaagatgcaattcctcctcctgaccctggtgaacagatcttcaacctgccaaaaaagtctcaccatgcaaactcccccacagcaggtgcagctaaatcaagtccagcagctaaaccaggatccacaccttctcgaccctcatcagccaaaagggcttcttccagtggctcagcatccaaatccgataaagatttagaaacgcaggtcatacagcttaatgaacaggtacattcattaaaacttgcccttgaaggcgtggaaaaggaaagggatttctactttgggaagttgagagagatcgagctactctgccaagaacacgggcaggaaaatgatgacctcgtgcagagactaatggacatcctgtatgcttcagaagaacacgagggccacacagaagagccggaagcagaggagcaagcccacgaacagcagcccccgcagcaggaagagtactgacccaccccggctgctcttgacacttccattgtgtgtgggaacgtttcttctggagaattggaacatgtgtggccccaagctcaacagaaaccagttgttcccaatctgccgttaccatcaacgcactgttgcatatgccagccactgcgcttggttcccattttctttgccaaggtgtattagcggacggccctctggccacctacccgagagatcgtagggtcacatacatccaacttcaccacttggctgcttgagattggttctgctcttttcttcatttctttccagaacaactctttcccaccccaacaccactgccaccacccctctttttatcctggtgtgaaacaatggtaatttgatatatggtatttatattggcatttttcaacccagtgtcactagatgtcacacacatttgtggtgctttgatgtttgcaagtctaacctctgaacataaatttggtcaaataattggaacaaagggaaacagatacttgatatgaaagccataatgacggtgacttgtgtcgtgggggaaaacataaggtcattttctccctctactcacaatactaaagggaaaaaatggattcaaagctaggatttcagggcccagcagtgttcctccatcagcatgttagacaactacacagtatgttgttagttttgaaagacattcactcaaggaaaacaccatctcaactttgcccgctcaccatgtcccttgcccccatgtagcccatttcccaggttatgctcttttctttctcagggtcctctttggtgggcagccactccccgagatgttgccatcagttttctgcagtccaaagagggtatggttaggtacgggtcttcctgcctcattcctcttcctctttgtgtaggtttcagccacaaaactgtcattcactctaggggacccctactaaagggtaacttcaggtgtgcagccctgagctccaaggctctgcaccatgccacacacttgctgtaaggctagaagtgaagaccttattaataggagcataattgcgagggagaatcatggttctgcagtctggtgtagacactggaataacagcacagaaaaatctatgactcccaatatcttctagaataaagaattttccctctttaacacaagggccctccttgtcattgaccttagctaaaccatggcaattcataaatagaggaaacattaatgaattaaaagcattccttattttttaactaatatttgtacattttcttagtctctttccaagtctttgcctcttttttttctttatttttattttttcctttgacagatggtatcccttcctggatcattcatttcaccttggtttctaactttaggtttactttcacttgttatttgacttagcaggtgcaacaaaaacaagaaacaaatgtgcccaccccactttccgcttaactgaaaagcttaaaataaatttctgaattatggg

SEQ ID NO: 401 - DNA, 1802 bp, Homo sapiens
ttccagaaaaggatattttttttattcaagtaactgcaaataggaaaccagagagggagccccaggctgggacaaatcatggctacccctccccaacagaacagggggaggaggtggcccctacaccctttatggtcgattcgggcccccttgctcactctgctgcagcatcctaggggcagggccccaccttccctgggactggggtagtcggtcacccagcctgccatgccccagcccctcttccccacaaagagtatcttgggggaggggatcgtgggcagaacaggaggcaatgaggatgaacatttggcgctggtagcagcagcaatgacggatgtcgaagaatggaacattgaacaaaaaacaacacaactgtccagaggtagtttgtgaacagaggaaaaatggaaccagaaccttggggggcagggaggagcaggaggggggttgggagcgggcagggtgagctccttgttattggtgccccatctgaggagggggaaatggctgagtggcggaagcaaagtagggttaggggagcagccccagcccacctcaggtggcggccacagggctcttgggcctcacctggacaataagtgactgcatctccatcaccacaatatgtactcagatcccaggcggagggcaagggggctgtggccacagtgaagagggagtaggggactcacccctcctgccttcctgtagccgaagggggctgtccaacctagtacggggactagggaagttggggaaggatgaaaagtgagccccacgtggtgacaaagacagtttggctgggggaatcctgggggccagcacccccctccattggccacacctgctgctgccagggcagtggagtagggcgtgccaggatgagatggggcttgggccccttttaaggccaggggaaccctcccaggccccactatgggaagccagagggaacagtgaaggagcagagagggcgcccccaaaccaaaagcccagagagcaatgtccccaccaccaagggagtggggacgcagcaggtgcagggtgcggctaagtgggatgttagccttgtccaggagggcatgtgtgtatgcgtgggtgggcggggggagctgggaactgaggccaggggaaaactgctccccactcagcccatgggagccctgcagcggctggtgtgctgtgtagtgtggtggtgagggcacaggtggaagatgggggtggcggccagaggcggtggtgatggtgggcctggggaaggggcgggggcggtgggagcggagcaaagctgtccagtcccagaaggaagctgctcctccagtgaggagcaggcggcacgcatgggtcactgctcctcctccgaggactcctgcgagatgccctcctcttcctccttctccagttttttgggtctgccccttggtttccttcctggagttgtggtggttttccgggtcttggcagcacccttgtttttgcttccctttggtcggccccgaggtctcttaggtgttggcacttcgctgggctccttctgactccctaccagcgctgtcccgggactcaccggaggctgcttgcgcggcctgccccggccccgcttctcagtgccgtccttttcctgcttggaggccaagggctggctggacttcgagctcgactcactcatcttcccttctctaaggagcaggtggaagagtgatggctgggatgcgcgagctcggccgccggcctgcggtgcgcgctccgggttgccgggagcggcggtgctgggcgctgaggaccggcctggctccgcc

SEQ ID NO: 402 - DNA, 1391 bp, Homo sapiens
  misc_feature 1353: n=a,c,g, or t
ggctcaacagatttctctttccacccatctattgcaggtgtagtggtcttgctgcttctccagggaggatctgcctacaaactggtttgcgactttaccaactggtcccaggaccggcaggaaccaggaaaattcacccctgagaatattgaccccttcctatgctctcatctcatctattcattcgccagcatcgaaaacaacaaggttatcatcaaggacaagagtgaagtgatgctctaccagaccatcaacagtctcaaaaccaagaatcccaaactgaaaattctcttgtccattggagggtacctgtttggttccaaagggttccaccctatggtggattcttctacatcacgcttggaattcattaactccataatcctgtttctgaggaaccataactttgatggactggatgtaagctggatctacccagatcagaaagaaaacactcatttcactgtgctgattcatgagttagcagaagcctttcagaaggacttcacaaaatccaccaaggaaaggcttctcttgactgcgggcgtatctgcagggaggcaaatgattgataacagctatcaagttgagaaactggcaaaagatctggatttcatcaacctcctgtcctttgacttccatgggtcttgggaaaagccccttatcactggccacaacagccctctgagcaaggggtggcaggacagagggccaagctcctactacaatgtggaatatgctgtggggtactggatacataagggaatgccatcagagaaggtggtcatgggcatccccacatatgggcactccttcacactggcctctgcagaaaccaccgtgggggcccctgcctctggccctggagctgctggacccatcacagagtcttcaggcttcctggcctattatgagatctgccagttcctgaaaggagccaagatcacgaggctccaggatcagcaggttccctacgcagtcagggggacccggtgggtgggctatgatgatgtgaagagtttggggcccaaggttcagttcttaaagaatttaaacctggggggtgccttgatttggtcttttgacatggttgacttcactggcaaatcctgcaaccggggcccttcccctcttgtccaagcagtcaagagaagccttggctccctgtgaaggattaacttacagagaagcaggcaagatgcccttgctgcctggggcctgctctctcccaggaattctcatgtgggattccccttgccaggccggcctttggatctctcttccaagcctttcctgacttcctcttagatcatagattggacctggttttgttttcctgcagctgatgccttnttgccctgaagtacaataaaaaaaattcattttgctcc

SEQ ID NO: 403 - DNA, 1451 bp, Homo sapiens
  misc_feature 1409,1414: n=a,c,g, or t
aagctccacctcattctaaaataggtctagaaaaagagagaaagcgaaaaatggatgtgagcgagataactcgttataccgaggattgctttagtgattctaattgtgtacccaataaatcaaaaatgcaagaagtagactttctagaacaaaatgaagagctacaagcagtagactcacagaaatatgcattatcaaaagtgaagcctgaatcaactgatgaagacttagaatctgtggatgccttccaacatctaatttataacccagataagtgtggagaagagagttcacctgttcatactagcacttttctttcaaataccttaaaaaagaaatgtgaagagagtgattctgagtcacctgctactttcagtaccgaagagccatcattctacccctgtacaaagtgcaatgtgaattttagggagaagaagcacctccacaggcatatgatgtatcatttagatgggaatagtcactttcgccatcttaatgtcccaaggccatatgcttgtagagaatgtggacggacatttcgagatcgcaattcacttctaaaacatatgattattcaccaggagagaagacagaagttgatggaggaaattcgtgaattgaaagaacttcaggatgaaggaagaagtgcacgattacagtgtcctcagtgtgtgtttggtaccaattgccctaaaacatttgtgcaacatgctaaaacccatgaaaaagataaaaggtactactgctgtgaagagtgtaacttcatggcagtgacagaaaatgaattggaatgccatcgaggcattgcacatggggcagtggtaaaatgccctatggtcacttctgatattgcccagagaaaaacacaaaaagagactttcatgaaagactctgtagtaggatcatccaaaaaatcagctacctacatatgtaagatgtgtccttttactacttcagccaaaagtgttttaaaaaagcacacggagtacttgcattcatcatcatgtgttgattcatttggtagtcctcttggacttgataaaagaaaaaatgacatccttgaagaacctgtagatagtgatagcactaaaacattaactaaacaacagtcaaccacatttccaaagaactctgctttaaaacaagatgtgaagcgaacatttggatcaacctcacaatcaagtagtttttcaaaaattcataagcggccacacagaatacagaaagctcggaaaagcattgcccaatcaggtgtaaacatgtgcaatcaaaacagctctcctcataagaatgttacaattaaaagcagcgttgaccaaaaacctaagtatttccatcaagcagcaaaagaaaagtctaatgccaaggcaaatagccactatttgtatagacacaaatatgaaaactanaggtngaccaaaaaatcaggtgaatcatatcctgtgcatctc

SEQ ID NO: 404 - DNA, 1348 bp, Homo sapiens
ggacggacgcttcggccgtaacgatgatcggagacatcctgctgttcgggacgttgctgatgaatgccggggcggtgctgaactttaagctgaaaaagaaggacacgcagggctttggggaggagtccagggagcccagcacaggtgacaacatccgggaattcttgctgagcctcagatactttcgaatcttcatcgccctgtggaacatcttcatgatgttctgcatgattgtgctgttcggctcttgaatcccagcgatgaaaccaggaactcactttcccgggatgccgagtctccattcctccattcctgatgacttcaagaatgtttttgaccagaaaaccgacaaccttcccagaaagtccaagctcgtggtgggtggaaaagtgttcgccgaggtgtgcatggtttcccagccacgtccctgttttcaaagatagtttcactttggtctctgaattgaaatgctgtctactgaaagggtttcaggagcgtttatgtaaggggctgtgatgaaattgcattccccatagataaaagaaaaatcatttctatccagagatctgagcagaaggattggcttgttagtttaacacggccgtatttttggacattcagtgttacttgctgagtctgacagcctctgggcccggccaggggccctgttaacaaactgctttcacatcccaacagggtctgcttggccactcagtgcagctgcgattaaccctaaaggctttaaggaacgggccacctgtaacagagacaccagccttcctgtatagacactaaattgttagcaagagtgttgagctagttcctggtgaagtgtttccacagaagacatgtggagcagttgtggggatattaagggaaactttcctctgccttgacccctttgttaaataaaatgactttgggagccattcattgtacagttgcaggaatgagagtgattttatgatgtggtacattgggaccatgttctaaaaccttgggtttctgagtctgctttttgagtaggtgattttgaggttgaaaaaccaggggccttcatctaggaaataccgcattttccagaagcttctttgaaagggaatcctggttttgttgccaaaatgaaacgcccggggttggcgctgaatcccacaactgtgtgatttgcttgttgagttttttgttgtctggtttttttgtttgtttgtttataccaataagaatgagcctgaatgttggtggtttttgaaatcctgacttggaggtaaacctggaggaaggaaaaaaagtaaatatgcaggcttttaggactgagtagccttgaaaataaatctcatttctaaaaagg

SEQ ID NO: 405 - DNA, 655 bp, Homo sapiens
cacctcatctggatgtatggcaccatcttcttcatgctgttctccaacttctggtatcactcttataccaagggcaagcggctgccccgtgcacttcagcaaaatggagctccaggtattgccaaggtcaaggccaactgagaagcatggcctagataggcgcccacctaagtgcctcaggactgcaccttagggcagtgtccgtcagtgccctctccacctacacctgtgaccaaggcttatgtggtcaggactgagcaggggactggccctcccctccccacagctgctctacagggaccacggctttggttcctcaccacttcccccgggcagctccagggatgtggcctcattgctgtctgccactccagagctgggggctaaaaagggctgtacagttatttccccctccctgccttaaaacttgggagaggagcactcagggctggccccacaaagggtctcgtggcctttttcctcacacagaagaggtcagcaataatgtcactgtggacccagtctcactcctccaccccacacactgaagcagtagcttctgggccaaaggtcagggtgggcgggggcctgggaatacagcctgtggaggctgcttactcaacttgtgtcttaattaaaagtgacagaggaaacc

SEQ ID NO: 406 - DNA, 1939 bp, Homo sapiens
gatttgttcagataaaactggaacactgacgaagaatgaaatgactgttactcacatatttacttcagatggtctgcatgctgaggttactggagttggctataatcaatttggggaagtgattgttgatggtgatgttgttcatggattctataacccagctgttagcagaattgttgaggcgggctgtgtgtgcaatgatgctgtaattagaaacaatactctaatggggaagccaacagaaggggccttaattgctcttgcaatgaagatgggtcttgatggacttcaacaagactacatcagaaaagctgaatacccttttagctctgagcaaaagtggatggctgttaagtgtgtacaccgaacacagcaggacagaccagagatttgttttatgaaaggtgcttacgaacaagtaattaagtactgtactacataccagagcaaagggcagaccttgacacttactcagcagcagagagatgtgtaccaacaagagaaggcacgcatgggctcagcgggactcagagttcttgctttggcttctggtcctgaactgggacagctgacatttcttggcttggtgggaatcattgatccacctagaactggtgtgaaagaagctgttacaacactcattgcctcaggagtatcaataaaaatgattactggagattcacaggagactgcagttgcaatcgccagtcgtctgggattgtattccaaaacttcccagtcagtctcaggagaagaaatagatgcaatggatgttcagcagctttcacaaatagtaccaaaggttgcagtattttacagagctagcccaaggcacaagatgaaaattattaagtcgctacagaagaacggttcagttgtagccatgacaggagatggagtaaatgatgcagttgctctgaaggctgcagacattggagttgcgatgggccagactggtacagatgtttgcaaagaggcagcagacatgatcctagtggatgatgattttcaaaccataatgtctgcaatcgaagagggtaaagggatttataataacattaaaaatttcgttagattccagctgagcacgagtatagcagcattaactttaatctcattggctacattaatgaactttcctaatcctctcaatgccatgcagattttgtggatcaatattattatggatggacccccagctcagagccttggagtagaaccagtggataaagatgtcattcgtaaacctcctcgcaactggaaagacagcattttgactaaaaacttgatacttaaaatacttgtttcatcaataatcattgtttgtgggactttgtttgtcttctggcgtgagctacgagacaatgtgattacacctcgagacacaacaatgaccttcacatgctttgtgttttttgacatgttcaatgcactaagttccagatcccagaccaagtctgtgtttgagattggactctgcagtaatagaatgttttgctatgcagttcttggatccatcatgggacaattactagttatttactttcctccgcttcagaaggtttttcagactgagagcctaagcacactggatctgttgtttcttttgggtctcacctcatcagtgtgcatagtggcagaaattataaagaaggttgaaaggagcagggaaaagatccagaagcatgttagttcgacatcatcatcttttcttgaagtctggctctgggagaggagtggacagcagctggttgagatacatccccatctggagacaggactgccactgacagaagatgtgagctgtgtctaagtccagtcttgtgcccagccgtgtctgcgccttcactctttggaactctgcatacaacatcttagcaccatcttcctgcagctcttccttacctaaataaagaaacagcccaagggcagtatttcc

SEQ ID NO: 407 - DNA, 1709 bp, Homo sapiens
gtgtcgtgaaaactacccctaaaagccaaaatgggaaaggaaaagactcatatcaacattgtcgtcattggacacgtagattcgggcaagtccaccactactggccatctgatctataaatgcggtggcatcgacaaaagaaccattgaaaaatttgagaaggaggctgctgagatgggaaagggctccttcaagtatgcctgggtcttggataaactgaaagctgagcgtgaacgtggtatcaccattgatatctccttgtggaaatttgagaccagcaagtactatgtgactatcattgatgccccaggacacagagactttatcaaaaacatgattacagggacatctcaggctgactgtgctgtcctgattgttgctgctggtgttggtgaatttgaagctggtatctccaagaatgggcagacccgagagcatgcccttctggcttacacactgggtgtgaaacaactaattgtcggtgttaacaaaatggattcactgagccaccctacagccagaagagatatgaggaaattgttaaggaagtcagcacttacattaagaaaattggctacaaccccgacacagtagcatttgtgccaatttctggttggaatggtgacaacatgctggagccaagtgctaacatgccttggttcaagggatggaaagtcacccgtaaggatggcaatgccagtggaaccacgctgcttgaggctctggactgcatcctaccaccaactcgtccaactgacaagcccttgcgcctgcctctccaggatgtctacaaaattggtggtattggtactgttcctgttggccgagtggagactggtgttctcaaacccggtatggtggtcacctttgctccagtcaacgttacaacggaagtaaaatctgtcgaaatgcaccatgaagctttgagtgaagctcttcctggggacaatgtgggcttcaatgtcaagaatgtgtctgtcaaggatgttcgtcgtggcaacgttgctggtgacagcaaaaatgacccaccaatggaagcagctggcttcactgctcaagtgattatcctgaaccatccaggccaaataagcgccggctatgcccctgtattggattgccacacggctcacattgcatgcaagtttgctgagctgaaggaaaagattgatcgccgttctggtaaaaagctggaagatggccctaaattcttgaagtctggtgatgctgccattgttgatatggttcctggcaagcccatgtgtgttgagagcttctcagactatccacctttgggtcgctttgctgttcgtgatatgagacagacagttgcggtgggtgtcatcaaagcagtggacaagaaggctgctggagctggcaaggtcaccaagtctgcccagaaagctcagaaggctaaatgaatattatccctaatacctgccaccccactcttaatcagtggtggaagaacggtctcagaactgtttgtttcaattggccatttaagtttagtagtaaaagactggttaatgataacaatgcatcgtaaaaccttcagaaggaaaggagaatgttttgtggaccactttggttttcttttttgcgtgtggcagttttaagttattagtttttaaaatcagtactttttaatggaaacaacttgaccaaaaatttgtcacagaattttgagacccattaaaaaagttaaatgc

SEQ ID NO: 408 - DNA, 1109 bp, Homo sapiens
accaacagatcccataccagaagatgagaaaaaagaataagtgttgccttgttttgtgtgttctaaatactttttttaatgaaaaaatgttttttggttttaatggtgttacgtggtttgtgtattaattttttttcttgtccatatcacaccaccaaaggcttttggaccatttagcatcatgagcctaatggctcagtcagtcacctttcttaagtgttgtgaagatggctcttttctttggatcttgtttctagccctcaactgctgaaagcctcagaatttagattaattgagaaaacacccacctcttttagagaattatcctttgatgctgcagaatctactcttacaatgccttcctacagctcactggggtgcttaccaaagccatagctttaaaccttcccagtccccatcagtagcttcctgaaagtctcctctcttgtttacttctgcaaagggtagcttcttaaaaacgtgatcatgtatgagtatgtatttgttcacttacccttttttacttttaatcaatgtcagataccaagagttgtgttaagctgagtgtagtgtgtaactaactacacttggatcttactgatccagaaatagtccccatagttagagtagttacttatgaagtggttattaaagtgaacacagcacatatacattatctatactgctttttgttatgattaatactgggtatgttctggtaaatccatccttattgtatagaaaaaaaattacttttttaccaggttttccaaagacagaatagatcacaaagctcaaggaatttaatattcttgtaatggactagataattcaaactgattagcccattccagaagaaaaacagctgggaattaagttaatccccttgaaattgttttacaataatcagaacatccaaacctcaaggctcaggatcccatagaccagagcccacctttttgataaacttagtaaagtcttggagactagaagcaagatagtttgtgacacataagcttcccaaaaactagaatagatttttactgaatagtggtatatctgatggtatatgtttcttaaaggtccaaatgtaataaaaaaaaaaatgg

SEQ ID NO: 409 - DNA, 2428 bp, Homo sapiens
aaaagtctctctacaaatgctttttcacactgtgtcacagctcccacctgcccttccagactgcaaagccaccttgccaggaaccacagacaaaggccactggtcaggtgacgctttttaattggctggtgtctttggagaatatcaagagtcacatgtgggccagagcagaaagcagaagcccagtgctcagggtgaggccttgggggaaacaacggtctgcgcgggagatcagcgatggctgaagaatccctgaggatggttgtatttaaatggcttcatcctgctaggacccctgaagagccgcagacacatcttctcctggggaaattccttgggcccctccacactgtcgtcatggctctcggtctccaggtaaacatccagcagcacacacagccgctgcagctggttggtcaacagctggtggctgggccaagggccacacagctccttgtagcacacattgacttcgccctccatggcccgaatgttgtcatcgttgctgttggttttctcccctttccagttcaaacagagctggaaaacaggtgggatggaggagtagccagggttcaacaccacagcggcctgcagtttggctgtgcccctttcgatgagcgccatgtagtagagattggtgtccccagccagtcccgcatccacaatgtctttggtgaagtgcagctccatgtaatcctcatgggcaactgtcacccatttcaccaggcgagagacaaccttggcagggaagaggtactggcaatcactggtaactggcacaatgccatgttctagggatgcaaactgtttgtggagggccaggcgggactgcaccctggtcttcagaagtttcatggtggtctccatgtggctggcgctcagcgagtggtcagcaatcactgtttgctggggctgctctttggggaagtggaggccacccagcttctgcacccacaaataggggtgacctagctcaagtacatagtcgctcaaagtcaggatgccaactttatcaaactgatactgattggctggattcggagttttctttccatgatccccaggatacaagcaactcaggactgagtcaggagacagcaagtcacctgcactgatgggggtgatcagctccatggcagttgtcactttggcttttactgtcatgatgttgaggttcatgaggtagtagaaagtcaggtgaagcacactgtcatctttgcacttcaggtcgagcatgacagacagtgggtgcctcttcagcatctccttgcgtttgtcgtccaactgaacccccagtgtgggtctccggcgcttcgtagtctgctcctcctcggcatctgagtcactctcgtcatcttgggagtcctctggaggtttgaacagagccttggcttcatccacactgccttcgattgccacagataacgtcttatcacaggcctgcccatacgcagtggcctgaacaaagaggacatagaggggaggcggcaggtgtctggctgtctcatactgcttgtgagcctggtcgaatggcataaacaggtactcctgcaccggaagggaagcctgcatgatgctgttgaggcggggctggaggctgctcaggtactccttcttcacctcaatctccttgagaatcttctccttgttagataggcactctcggtacttctctgccagccttttccgctgctccagctcccagtccagacgtgccagtgtttgctggtgagggtctcccatggtgacttcggccttgctgatatctggtggagcctccttataaaactcctctaaactgaccagatcaatttcttcatgctttgacttaaactccaaacatttggtgatctccttctgtaggtgcatcacctcatacaacaggttctggagctgcagatgataggcatctactttctgcttagcctcgtgggtctgatctcttcctttcttcaacctgatgtgggctaatcggttaagcttctttagagtcatgaaatgcacacagctctggatcctccgttcttctatttctattgccacatccttgccacccctgctcttcaggtcttggatctcagccatcagcctctgtagctcctggcaggtgtacttgtataactcatagtctctgccagggtcccgcagatccacctcggcctcctcactgtagtatttaccttcctgctcggtgtcagatcgattccgctttccttcagctggggctccatcgcttcggatcactttgggcttccgttttttgctcgattctgatgacatggttgttcctccacaggggttgttgtgggctttaacacaggaggcattccactggggaaggtgatgaagatgacctgggactgtggcttcagatgatgcataggtgatcttaaataatgctgaacacctcacagctccaaggaaa

SEQ ID NO: 410 - DNA, 2273 bp, Homo sapiens
ttttggaattttatttaaaaaaaaaaaaaaaacatcacaaccatgaacattgttacagttaagaggccctcttggttctccacaatgatactgagcatgctcacaaggggttcccattgttaaagtcttaaacaaccatttttaaaagaaggaagaaaaaaaaactccgcacactaccatttaacttgttttaatgtttcttcacaaatggtgaaaaatactaaagtacagacaaggaataatcataatgttgtggccaacattataaatatggaattataaatttaaaacattttctggtttaaaaaataaatctggtagtcaatgcagctctgcggggtctctgcatctagtagggccgatctctgcgctcctgacggtgctcgcctttatccatttttccaggtcctccacgtcctcctcttcttcctcccatctgttccatcaaaggtccagggggccccccagggccacctcgtcttcctccaccaaagccacctcggtccatgccccggccaccacggaagccacctctgtctccaccacggccacctctgaacattccaccgggaccaccacgatccatgaggccacctcttcctccccgcatgccaccagggccacctctgccacgatcaccacactggttgcactctgttctccaggcgaagttctggtttccacaacccggattgggacactgccagtctccagctcggtgctggacgtttcctcctccagaggggttccctcgggaaccccggggtcctcttggagggaagcctcctctatctcctccacggcctcccatgcgacccatgggtcccccaggacctcctgggcctcctggacctccacggagtggtggtggcatgcctctgccctcacggggtggcagaccaccccgcatactgttcattggaggcttcttccgagcaagggagactttaagtttgctcccttgaaaatctttcccaacaaaccattccacggcagccttggcagtgggtgggtcttcataggacactgtggcatcgcctttgggctttcctgtttccttgtccaggtagatgtggatcatgggttgcccagttctcttgttcatcttaacaaccccacactgcttaaagaagtctgccagatcatctagagtcacactgtcatttaatccttgtacataaattgcactgttgtcagagtcttcatctggatctacaggtgggcctagatcaagatctggtccttcatccatgggtccaccaggcttattgaagccacctcgctctccagcgcccattccaccgcgtcctcctccccgcccacctctgctcatgcctccacgatcaaatccccctcttcccctgccccggttatcagggccactcatgctccggttctctcctggtccggaaaatcctccagactcctgcccataaacacccatgctactggggtggtcctgtcggaatgaactctgctgcccgtagctgctgctctgttggctatattgacttggagcttggctgtaggatccagtttggggtgggtaactagtgggaggctgctgcccatagctgctttgttgaccatagctactctgctgtccatagctgctcggttgcccataggtgttctgctgagagtaactgctctgatcataactagtcggctgtgtagaggaatagctggtaggagggtaggatggaggtgcagtgactggctgcatggggtagctcccaggtacctggggataactgtagttactctgtccatatcctaggctgggctggttgtaaccccctgtgctagattgaggttgactagtctcagtgggcttgtttccatcctgcggtcttgtaggtgcagtggctgctggctgctgcccataggctggataagcaggctgagtgccatatgcagactgagctgcataggaggcctgggtggtggtgactgtagcagtggtggtatcataagcaccagtgccatacccctggacaggctggctgtatgcctggggggcagttggagtagtataaccagtgggaggctgtccataagaagttgcataggcggtctgcccataggttgcagtggtctgagcctgggtatagctgacatcagtgggctgtccataggttccatagctttgttgcccatatgcctgggtggtctgtgcatatccttgagtgggctgggcggtgtaagcactgtagccctgctgcgctgcagcttggctataggtactgtaatccgtggacgcaccttagaaa

SEQ ID NO: 411 - DNA, 1902 bp, Homo sapiens
cagctctttcgggataaccacctgatacctgcagaaacccccagtcctgttattttcagtgattttccatttatctttaattcgctatccaaaattaaattattgcaagctgattcacatataaagatgcagatgtcagaaaagaaagcatacatgcttatgcatgaaacaattctgcaaaaaaaggatgaatttcctccatcacccagatttatacttagagtcagacgaagtcgcctggttaaagatgctctgcgtcaattaagtcaagctgaagctactgacttctgcaaagtattagtggttgaatttattaatgaaatttgtcctgagtctggaggggttagttcagagttcttccactgtatgtttgaagagatgaccaagccagaatatggaatgttcatgtatcctgaaatgggttcctgcatgtggtttcctgccaagcctaaacctgagaagaaaagatatttcctctttggaatgctgtgtggactctccttattcaatttaaatgttgctaaccttcctttcccactggctctgtataaaaaacttctggaccaaaagccatcattggaagatttaaaagaactcagtcctcggctggggaagagtttgcaagaagttctagatgatgctgctgatgacattggagatgcgctctgcatacgcttttctatacactgggaccaaaatgatgttgacttaattccaaatgggatctccatacctgtggaccaaaccaacaagagagactatgtttctaagtatattgattacattttcaacgtctctgtaaaagcagtttatgaggaatttcagagaggattttatagagtctgtgagaaggagatacttagacatttctaccctgaagaactaatgacagcaatcattggaaatactgattatgactggaaacagtttgaacagaattcaaagtatgagcaaggataccaaaaatcacatcctactatacagttgttttggaaggctttccacaaactaaccttggatgaaaagaaaaaattcctctttttccttacaggacgtgataggctgcatgcaagaggcatacagaaaatggaaatagtatttcgctgtcctgaaactttcagtgaaagagatcacccaacatcaataacttgtcataatattctctccctccctaagtattctacaatggaaagaatggaggaagcacttcaagtagccatcaacaacaacagaggatttgtctcacccatgctcacacagtcataatcacctctgagagactcagggtgggctttctcacacttggatccttctgttcttccttacacctaaataatacaagagattaatgaatagtggttagaagtagttgagggagagattgggggaatggggagatgatgatgatggtcaaagggtgcaaaatctcacacaagactgaggcaggagaatagggtacagagatagggatctaaggatgacttggacacactccctggcactgaagagtctgaacactggcctgtgattggtccattccaggaccttcatttgcataaggtatcaaaccacatcagcctctgattggccatgggccagacctgcactctggccaatgattggttcattccaggacattcatttgcataaggagtcaaaccacaccagtcttggattggctgtgagccaattcacctcagtctctaattggctgtgagtcagtctttcatttacatagggtgtaaccatcaagaaacctctacagggtacttaagccccagaagattttgctaccagggctcttgagccacttgctctagcccactcccaccctgtggaatgtactttcacttttgctgcttcactgccttgtgctccaataaatccactccttcaccaccc

SEQ ID NO: 412 - DNA, 1834 bp, Homo sapiens
aatctttcaaagcctcagttttatgaccctgtggagccagtggactttgaaggacttctgatgacacacctgaacagcctggatgtgcagcttgcccaggagctcggggacttcactgatgacgacttggacgtggtgttcacgacaaaggaatgtaggactttgcagccctctttgccggaggaaggggttgaactggaccctcatgtcagggactgtgttcagacctacatccgtgagtggctaatcgtgaaccggaaaaaccaaggaagtccagaaatctgtggctttaaaaagactggatctcgaaaagattttcacaagacgcttccgaaacagacgtttgagtcggaaaccttggagtgcagtgaacccgctgctcaggcaggcccccgccacttaaacgtgctgtgcgacgtgtctgggaaaggccccgtcactgcctgtgactttgacctccgcagcctgcagcctgacaagcggctagaaaacctcctgcagcaagtgagtgccgaggactttgagaagcagaacgaggaggcccggaggaccaataggcaggccgagctctttgccctttacccatcagtggacgaggaggatgctgtggaaatacgtccagtaccagaatgtcccaaggaacacctgggcaacagaatattggtcaagttgctgaccttgaagttcgagattgaaattgagcccctgtttgccagcattgccctctacgatgttaaagaaaggaaaaagatctcagaaaattttcactgtgacctgaactctgaccagttcaaaggatttctgcgagctcacacgccttcagtggccgcatcaagtcaggcgagatctgcagtcttctcagtcacctacccgtcctcagacatctacctggtagtcaagattgaaaaagtcctgcagcagggagagattggagactgtgcagagccctacacggttatcaaagaaagtgatggtggaaagagtaaagaaaagattgaaaaactaaaactccaagctgaatccttctgccagcgtttggggaaataccggatgccctttgcctgggcacccataagcttatcaagcttcttcaatgtctccacccttgagagggaggtaactgatgtggactctgtggttgggagaagctcagtgggtgaacggaggacattggcccaatctagaaggctttctgaaagagccctctccttggaggaaaatggggttggatccaacttcaaaacctccactctgagcgttagcagctttttcaagcaggaaggagatcgccttagcgatgaagacttattcaagtttttagctgactacaaaagatcatcatccttacagagacgagtcaagtcaattccaggcttgctaagactggagatttctacagctccagagatcatcaattgctgtctgactcctgaaatgctgcccgtgaaaccctttcctgaaaaccggacacgcccgcacaaagagattttggaatttccaacacgagaagtatatgtccctcacactgtgtacaggtaagaaacacaggctcgggctgggcgtggtggcttacaccataatcccataactttgggaggccgaggcaggaggattgcttgagctcaggagtttgagaccagccttggcaacatggcaaaaccgtgtctctacaacatatacaaaatttagctgggcatggtggtgcatgcttgtaatcccagcaacttggcaggctgaggcaggagaatcgcttgaacccaggaggcagaggttgcagtgagccaagattgcactactgcactccagcctgggagacagaaccagactctgtctc

SEQ ID NO: 413 - DNA, 1564 bp, Homo sapiens
ctgtaaataaattagtaactataaataaatgaatctgtttccaacaaagtgctgggattacaggcgtgagccaccacacccggcccgcaattgctaactttcttaggaaacctcacattgtcccaatagccccactcagtattgtgacgggccctgtggtagtgctgctgggcctggtgttgcactggaggctcttggtgaggatagtggtcaggcccacagccccatttggcttttagtgctgccactgcctcaggaaaaatgggaaccatgtctcttttggaaaggttgtctctaagactcaagatcttgtgggtatttgggtttttactagaattttcttttgaaataggtcgcagcagttgtggtagaaatttctgggttagtggactctcttctacaaccagagctacagatttgaagaatcttttcagcaaatatgggaaggtaagtgccagagcttttctggagaagatactttgaaaccagcgttgtgtggcctttacatggaggtcctctcccctcagtgagttctttgagagataccaaggagcttacacttgctaatggctggggagggtctgcccgtccacaggtagaggtgagagtggtgtggaagcttccagagcccacatcaccactgtatttccctcccttctctgcgagcttgcccccttccctgtgatggctcgtggatccatttctgtgtcctcaggacgtcgcactcaggctgggctgccagggttggctggtggggtgctggtcagcatgtctgggagacagcagtgttcttagaacagtgttcgtgatgctggaactcagaactcagaacagggaccctggagtctgatgataggggtcctcaccacgggtgtcttgggtccattgactgaacctcacctcagcagctgggggctctcaaagttgctgcctcagttcaccactgggggcagttctagtggcctcttgtctgcagcacctgcctttcctgagcccgtgaaggtggggctggtggcaccagccccctacctgcagtgcccagcgcagccgcctggccctcctccctgtgctttctcactcccttcctccctggtgtttcccagacttgcctcccaaacagcctcctgcattcagggctcctcgtctctctcagagtcggtttcggggactaccaaaggaaggagtccaatcctttgtgttacacagtgagggttcaacacattgcaatatagaaaaccaagtgttttccctgatactgacttcgaagaacttaaaagaggataaaacaggctgggtgtggtgctcacccctgtaattccagcactttgggaggccgaggtgggtggatcacgaggtcaggagtttgagaccagcttggccagtatggtgaagcctgtctctgctaaaagtacagaaattagccgggcgtggtggcgcatgcctgtaatcccaggtacttgggacgctaaggcaggataacaacttgaacccaggaggtggaggttgcagtgacccgagaccgtgccactgcactccagcctgggacagagcaagactccatctt

SEQ ID NO: 414 - DNA, 1191 bp, Homo sapiens
tttttttttttccatacaacacagtatcaaaaagtaaaaggaacacactaaatgcacaagctggtggcaagtaagtccacagcctattgtgataggtccatccagcatcaatcagatttcttctcatctgttatctcaaggttatttacagatgtgttgactaacaagagtctctcatgggaggatgggcaggcttcaatcattggtttcgggatctgtctgcgccatgtaggcatccaactcagcatccaggtgtccttttgttttcgacatatatgcatccaattggttgtccagctgctccttggtcaatacagggcgagcaagggcacctctccctcgtccacggcctcggcctcggcctccaaagccccctcttccccgacctatcataccccgacctctaccaccgattccgccacgacccatagctccacgccctaggccccctctcccaggacctccacgacctcgaacaccacctcttcttaagcccattcggggagctacggctcgtccacctcggagcaggttttgacctcggagtgacatcccgcccctaagtagggttctggtggcacgtcccccacgtagtcctcctctgggcaagcctctctggattatgggtaggcctcgtcctccgattgctcccctggccagggcccctatgggtcggcctaaccgtgcctggatgttactcttacccaggcgctgctttaagctctgcttaagttttaatgctgcctggacagagggtctattctccatctgctgggccagtcttctgtttctggcactggctagctgctgttgttgctgcatcgaagcccgaatattcactggcgtcggctgtttgttcttcagcatattagtaaagcgctcatttagagacatcttggtggtgctttttagcacaactttcggcgctgactgtgcagccatcttcgaatcccgagaatcgaaggaaacagacgccagtgctcctcccggggctgccaccacggctccggcaggcgggccggggaccggccgaacctgagttgacggtggaggggctcgggttagctagatgggcggttggttagatgcgtaagcggtagtatgcgagctcagttcgttgttgctggttggctgtctagtcggccgatccgtctgctcacccggcctgccctttcctgcctttcgtctgca

SEQ ID NO: 415 - DNA, 1532 bp, Homo sapiens
gccaggtctctggggcccacctgaaccctgccgtgacctttgccatgtgcttcctggctcgtgagccctggatcaagctgcccatctacaccctggcacagacgctgggagccttcttgggtgctggaatagtttttgggctgtattatgatgcaatctggcactttgccgacaaccagctttttgtttcgggccccaatggcacagccggcatctttgctacctacccctctggacacttggatatgatcaatggcttctttgaccagttcataggcacagcctcccttatcgtgtgtgtgctggccattgttgacccctacaacaaccccgtcccccgaggcctggaggccttcaccgtgggcctggtggtcctggtcattggcacctccatgggcttcaactccggctatgccgtcaaccctgcccgggactttggcccccgcctttttacagcccttgcgggctggggctctgcagtcttcacgaccggccagcattggtggtgggtgcccatcgtgtccccactcctgggctccattgcgggtgtcttcgtgtaccagctgatgatcggctgccacctggagcagcccccaccctccaacgaggaagagaatgtgaagctggcccatgtgaagcacaaggagcagatctgagtgggcaggggccatctccccactccgctgccctggccttgagcatccactgactgtccaagggccactcccaagaagcccccttcacgatccaccctttcaggctaaggagctccctatctaccctcaccccacgagacagcccttcaggatttccactggaccttgcccaaatagcaccttaggccactgcccctaagctggggtggaaccggaatttgggtcaatacatccttttgtctcccaagggaagagaatgggcagcaggtatgtgtgtgtgtgcatgtgtgtgcatgtgtgtgcatgtgtgtgcaggggtgtgtgtgtggggggggttcccagatattcagggcaagggaccagtcggaagggattctggctattgggggagcccagagacaggggaaggcagcctgtccatctgtgcataaggagaggaaagttccagggtgtgtatgtttcaggggcttcacatggaggagctgcagatagatatgtgtttctgtgtatgtgtatgtctgcctttttttctaagtgggggcttctacaggcttttgggaagtagggtggatgtgggtagggctgggaggagggggccacagcttaggtttggagctctggatgtacatacataagtaggagcagtgggacgtgtttctgtcataatgcaggcatgaagggtggagtgaagtcaggtcataagtttcatgtttgcttttgttttgttttgtttttaatgtatgtagcagatgttacagtcttagggatccgggatgggagaccccactttagaaagggtcgtcactcctttaatcctctactcaacaatgtactcttttacttttatattaaaaaaaataaaataaatatgtgcct

SEQ ID NO: 416 - DNA, 1044 bp, Homo sapiens
ggagaagtggatgagaaagaatgggttcattaagagcttgtatgagaaaaactttttacgtctcttcctgagtctgtatgtagtactttcaggtaatcaaagctgtgaggacttaccagtttcttatccaaactattggctagggtggttaccactgtaatacaactgcttaggacacttgaactacagttgatatgttatttaagctactcagaaagacttttctgacggaagatttctctatttctcattctcaactttagctcctctgagtgttcctccaaatctgtcttttggagtagacctagaaatcatctgttactaaggtgtactatgcatgtggaaccattgatttaagagttgagtactcttaagtattctaaatatttggtaattctgtctcccactgtaaaacgaaacaaagtacacagaaactctatccaagaaaatgtggaaaacttactgttgccataatcctgtaccagaataaagctcttggtatctctgcaataattaacacacgtttaagcacaattcttcttatacaaagttacaaggtatgtgaacaaagtatattttaaaattgtagctcactgtgtttttttttaatatcatgatttattcctttcagaagaatacgaacaaatgcgaaaatgaattacattcttttaagttttgtactggcaatggtagcatgtttctttgtcgagagacaattagaagagcagaaaaactgggagggaggggaaatgcaggtatttcatttatttatggctcatgaattcagaatttttttgttggaaattgaagtcaggtcaaattaaactattatttataagaaaattgtcagcctgggaaacatggtgagaccatgtatctacagaaattttaaaagttagctgagcgtgatggtgtgctcctgtggtcacagctgcttgggaggttgaggtgggaagattgcttgagcccaggaggttgaggctgcagtgagctgtgttcatgccccccccctctagcctgggtgacagagtgagaccctgtttc

SEQ ID NO: 417 - DNA, 372 bp, Homo sapiens
cacataggatgaataatatcagttctaccgtacaaccctaacataaccattcttaatttaactatttatattatcctaactactaccgcattcctactactcaacttaaactccagcaccacgaccctactactatctcgcacctgaaacaagctaacatgactaacacccttaattccatccaccctcctctccctaggaggcctgcccccgctaaccggctttttgcccaaatgggccattatcgaagaattcacaaaaaacaatagcctcatcatccccaccatcatagccaccatcaccctccttaacctctacttctacctacgcctaatctactcctacctatctccccttttatactaataatct

SEQ ID NO: 418 - DNA, 2094 bp, Homo sapiens
catttttccttgagagaagaacagtggcaagaagactgggcatttatactctctcttgctagtcagcctggagcaagcttggagcagacgcacatttttgtactggcacatattcttagacgaccaattatagtttatggagtaaaatattacaagagtttccggggagaaactttaggatatactcggtttcaaggtgtttatctgcctttgttgtgggaacagagtttttgttggaaaagtccgattgctctgggttatacgaggggccacttctctgctttggttgccatggaaaatgatggctatggcaaccgaggtgctggtgctaatctcaataccgatgatgatgtcaccatcacatttttgcctctggttgacagtgaaaggaagctactccatgtgcacttcctttctgctcaggagctaggtaatgaggaacagcaagaaaaactgctcagggagtggctggactgctgtgtgacggaggggggagttctggttgccatgcagaagagttctcggcggcgaaatcaccccctggtcactcagatggtagaaaaatggcttgaccgctaccgacagatccggccgtgtacatccctgtctgatggagaggaagatgaggatgatgaagatgaatgaaaaaaaaaatcaaacagcagaagaccaaggcatcagatctgtaatgaccctaaagttagtgtggtgctccaagcagagtcgacatcatggaatgaaccaaatctggcaggatctgctcggggaagtgttttcctggaccacacacaccttatggagataatgcctctgctgcgtgaggagacagagaactttagttggactacagtttgtaaaaaaaactaattttattaagacagaactttttttccttccaaattgtaaatctgtctataaatgtaacgcatgtggttgtgtaagacattgtttaataggaaaagttgtaccagcatcttcatattattgagaaaattttttccagcatgggcacttagaaaaagcacatggcaaatggctctttgttcctttcagatattatttcagtagaacctggcattctcctttcaccttaaaagatccatctaagtctcagatctggaaacgttttgtaccgattatccacagcaaaacaaaaataagcttttattttattaacaatttcgttcctcttgtgcccaatcaaatcttttaggaacaaactgcaagaaaagctaagaatgttttagagtgaactaaatacagacattgcttacttgttttgaagagggttttggttttggttattgtgtcttttaagttttctgatatgccccctttcaatatttagatatttatttgttgggaagaataccttaaaatgagggttcttattccagattctgggcagtggtctgtgagtagtttttttcctggatgaaaagggagcaagcccacttgtcactaaatgaattgtgtgaaatgtgctcacttggactccatcaacaatgtgctgctcccagattgccatgccagagggtcttcggattcttccatcacctctgctctaagcaaatcttgttagaagggcatgcctttgcttaggcagattgggaataccaattcactacagaataaagattttaaaaatgcaataaggtggcaaatgcattgtatgaagaatttctcagtgtttagtctgagaatttttgcatgttggttaattgtggccattctttaatttaaagttaaaactataatcttaggtagaacaacttttttataagaagtattatttgaccacttcaggtatacattcaatactgggtaaaaatttcagacctatctcaggaacacagaaatatttggtgtcctgataagcactttctagactattgatgtggccaggaatttggaaagacgacacacgcacgcacacacacacacacacacacacacacagttttttccttccctgtgatgaaaaaggctgtgaaaaccttaaagtatttgcttgcttcttgttttgtttagttgataatgaaatgtgtacaacctcaaatttgctgccagaatactaaaaatagaaaaatcccc

SEQ ID NO: 419 - DNA, 1308 bp, Homo sapiens
gaacgagtctccagcaccatgtctggtttgtctggcccaccagcccggcgcggcccttttccgttagcgttgctgcttttgttcctgctcggccccagattggtccttgccatctccttccatctgcccattaactctcgcaagtgcctccgtgaggagattcacaaggacctgctagtgactggcgcgtacgagatctccgaccagtctgggggcgctggcggcctgcgcagccacctcaagatcacagattctgctggccatattctctactccaaagaggatgcaaccaaggggaaatttgcctttaccactgaagattatgacatgtttgaagtgtgttttgagagcaagggaacagggcggatacctgaccaactcgtgatcctagacatgaagcatggagtggaggcgaaaaattacgaagagattgcaaaagttgagaagctcaaaccattagaggtagagctgcgacgcctagaagacctttcagaatctattgttaatgattttgcctacatgaagaagagagaagaggagatgcgtgataccaacgagtcaacaaacactcgggtcctatacttcagcatcttttcaatgttctgtctcattggactagctacctggcaggtcttctacctgcgacgcttcttcaaggccaagaaattgattgagtaatgaatgaggcatattctcctcccaccttgtacctcagccagcagaacatcgctgggacgtgcctggcctaaggcatcctaccaacagcaccatcaaggcacgttggagctttcttgccagaactgatctcttttggtgtgggaggacatggggtaccacctacacccaacaagtcaatgagggacttctttttaatttggtaggattttgactggttttgcaacaataggtctattattagagtcacctatgacaaaaaataggggttacctagataatgccaaagtcagcatttgtcctgggttcccttgtgtgatctgtttggactatgttttcttttcttctcccacttgctcagcagcttgggcttccattctagttcttttaccaagatttttgtgtgaccatgttgacttcatttggattgccctctttcaatttccttgtgaaaacacccttaactttctctttacccttagctgaaatgtttacatagcttctggtgatatcttttcatgattttatatctcttaaaatggtgatggatgtgacacctcataaaagtgagctttgaactgtagataactcttaaagaaaatgtcattttagacaattaaaatatttgtgccc

SEQ ID NO: 420 - DNA, 1792 bp, Homo sapiens
ggcagcagccggacgagcagcggaggcggtcgggagcgatggtgaagatggcggcggcgggcggcggaggcggcggtggccgctactacggcggcggcagtgagggcggccgggcccctaagcggctcaagactgacaacgccggcgaccagcacggaggcggcggcggtggcggtggaggagccggggcggcgggcggcggcggcggtggggagaactacgatgacccgcacaaaacccctgcctccccagttgtccacatcaggggcctgattgacggtgtggtggaagcagaccttgtggaggccttgcaggagtttggacccatcagctatgtggtggtaatgcctaaaaagagacaagcactggtggagttgaagatgtgttgggggctttgcaacgcagtgaactacgcagccgacaaccaaatatacattgctggtcacccagcttttgtcaactactctaccagccagaagatctcccgccctggggactcggatgactcccggagcgtgaacagtgtgcttctctttaccatcctgaaccccatttattcgatcaccacggatgttctttacactatctgtaatccttgtggccctgtccagagaattgtcattttcaggaagaatggagttcaggcgatggtggaatttgactcagttcaaagtgcccagcgggccaaggcctctctcaatggggctgatatctattctggctgttgcactctgaagatcgaatacgcaaagcctacacgcttgaatgtgttcaagaatgatcaggatacttgggactacacaaaccccaatctcagtggacaaggtgaccctggcagcaaccccaacaaacgccagaggcagccccctctcctgggagatcaccccgcagaatatggagggccccacggtgggtaccacagccattaccatgatgagggctacgggccccccccacctcactacgaagggagaaggatgggtccaccagtggggggtcaccgtcggggcccaagtcgctacggccccagtatggcacccccaccccctcccccaccacccgagtatggccctcacgccgacagccctgtgctcatggtctatggcttggatcaatctaagatgaactgtgaccgagtcttcaatgtcttctgcttatatggcaatgtggagaaggtgaaattcatgaaaagcaagccgggggccgccatggtggagatggctgatggctacgctgtagaccgggccattacccacctcaacaacaacttcatgtttgggcagaagctgaatgtctgtgtctccaagcagccagccatcatgcctggtcagtcatacgggttggaagacgggtcttgcagttacaaagacttcagtgaatcccggaacaatcggttctccaccccagagcaggcagccaagaaccgcatccagcaccccagcaacgtgctgcacttcttcaacgccccgctggaggtgaccgaggagaacttctttgagatctgccatgagctgggagtgaagcggccatcttctgtgaaagtattctcaggcaaaagtgagcgcagctcctctggactgctggagtgggaatccaagagcgatgccctggagactctgggcttcctgaaccattaccagatgaaaaacccaaatggtccatacccttacactctgaagttgtgtttctccactgctcagcacgcctcctaattaggtgcctaggaagagtcccatctgagcaggaagacatttctctttcctttatgccattttttgtttttgttatttgc

SEQ ID NO: 421 - DNA, 1219 bp, Homo sapiens
agccgcctgcatctgtatccagcgccaggtcccgccagtcccagctgcgcgcgccccccagtcccgcacccgttcggcccaggctaagttagccctcaccatgccggtcaaaggaggcaccaagtgcatcaaatacctgctgttcggatttaacttcatcttctggcttgccgggattgctgtccttgccattggactatggctccgattcgactctcagaccaagagcatcttcgagcaagaaactaataataataattccagcttctacacaggagtctatattctgatcggagccggcgccctcatgatgctggtgggcttcctgggctgctgcggggctgtgcaggagtcccagtgcatgctgggactgttcttcggcttcctcttggtgatattcgccattgaaatagctgcggccatctggggatattcccacaaggatgaggtgattaaggaagtccaggagttttacaaggacacctacaacaagctgaaaaccaaggatgagccccagcgggaaacgctgaaagccatccactatgcgttgaactgctgtggtttggctgggggcgtggaacagtttatctcagacatctgccccaagaaggacgtactcgaaaccttcaccgtgaagtcctgtcctgatgccatcaaagaggtcttcgacaataaattccacatcatcggcgcagtgggcatcggcattgcgtggtcatgatatttggcatgatcttcagtatgatcttgtgctgtgctatccgcaggaaccgcgagatggtctagagtcagcttacatccctgagcaggaaagtttacccatgaagattggtgggattttttgtttgtttgttttgttttgtttgttgtttgttgtttgtttttttgccactaattttagtattcattctgcattgctagataaaagctgaagttactttatgtttgtcttttaatgcttcattcaatattgacatttgtagttgagcggggggtttggtttgctttggtttatattttttcagttgtttgtttttgcttgttatattaagcagaaatcctgcaatgaaaggtactatatttgctagactctagacaagatattgtacataaaagaatttttttgtctttaaatagatacaaatgtctatcaactttaatcaagttgtaacttatattgaagacaatttgatacataataaaaaattatgacaatgtc

SEQ ID NO: 422 - DNA, 2441 bp, Homo sapiens
cttgaatataattttgtttttactcttccctccccacttgaatacagtgttgagacttaaatggtttataatgtaattcttacgcagtttaactatgtagatagattcctattgcaccataatttaatactgagagattttcttccggggatttctgcatctggtctctgtttacatccccaaacgcagcctgcttagaaacagtcctggtcttgcctgtttggtagccactgactgctgatgtctcctggccagcagtttggggaggtctccactaccacagccgccctgatctcctcgagcacagggctctccaccaggactcgggctgggcatgcgcccctggcttgagaactttccagagaacattcccattggcttcgcagctcaccaggctgtggttggaacctgagaggtacattatgctccatttccttcactcatgattacgaccagctgccccatcgccctcatttagactttatctgcatttgctgttgggttctctcttcatcttgtccgctgtgcctgccgaaaccactggtctttggtaagaaaactcctttaccttctccacctgcttcctagaacagcccctctgccttcctgtggatggagagctagcctgcccctgatgatactcctgtccttctggctttctcaggaagcagcggcacccacatagggaggctgcggaaggggcacaatctgtgtgctttccactggtcccgagagagagtggcctggcccttctcgttagttcctctacccgagtccttctacctcttcctgtcccttttgctttattgcctggcctcgtggacttcatcacatgcttttagcatttgagaacctggccaggatggaaatgtcctattaaatgttccttatacataaaatgatctgaggaaaatccaaaattatttcctaacatcttacgtactgggtataaaagaggttcgctcttcagatatacagagcacacacttactgtattgaaaatatgattacattcagcctaggcaaaccatcattttaggcttacatgacataaatgtatttttgttaaatcttaagacatttctgtccacaggcatggtgatataagaaaaaaaaaaaaaaaaaaaaaaaagcggccgctttctaagaggaggagaagcaggagctgtcgggaagatcagaagccagtcatggatgaccagcgcgaccttatctccaacaatgagcaactgcccatgctgggccggcgccctggggccccggagagcaagtgcagccgcggagccctgtacacaggcttttccatcctggtgactctgctcctcgctggccaggccaccaccgcctacttcctgtaccagcagcagggccggctggacaaactgacagtcacctcccagaacctgcagctggagaacctgcgcatgaagcttcccaagcctcccaagcctgtgagcaagatgcgcatggccaccccgctgctgatgcaggcgctgcccatgggagccctgccccaggggcccatgcagaatgccaccaagtatggcaacatgacagaggaccatgtgatgcacctgcttcagaatgctgaccccctgaaggtgtacccgccactgaaggggagcttcccggagaacctgagacaccttaagaacaccatggagaccatagactggaaggtctttgagagctggatgcaccattggctcctgtttgaaatgagcaggcactccttggagcaaaagcccactgacgctccaccgaaagagtcactggaactggaggacccgtcttctgggctgggtgtgaccaagcaggatctgggcccagtccccatgtgagagcagcagaggcggtcttcaacatcctgccagccccacacagctacagctttcttgctcccttcagcccccagcccctcccccatctcccaccctgtacctcatcccatgagaccctggtgcctggctctttcgtcacccttggacaagacaaaccaagtcggaacagcagataacaatgcagcaaggccctgctgcccaatctccatctgtcaacaggggcgtgaggtcccaggaagtggccaaaagctagacagatccccgttcctgacatcacagcagcctccaacacaaggctccaagacctaggctcatggacgagatgggaaggcacagggagaagggataaccctacccccagaccccaggctggacatgctgactgtcctctcccctccagcctttggccttggcttttctagcctatttacctgcaggctgagccactctcttccctttccccagcatcactccccaaggaagagccaatgttttccacccataatcctttctgccgacccctagttccctctgctcagccaagcttgttatcagctttcagggccatggttcacattagaataaaaggtagtaattagt

SEQ ID NO: 423 - DNA, 1510 bp, Homo sapiens
tttctcttatttttaattattgtgatagaaatttactcttgtgtaaattgctgtatacctgtgtcactgatgaggaaattctaattatcttgaatagttttaaaaatgggaatgtttctgggagaaaggaattccccaaaagagaaaaaataaattgctcttttggcagttggattagtggtgaaagagtgttataacccaaaaaattcataaaggtaccagctattgtcagcatttggtagtaaagagaatgtcttataaacctattgatatgatgaagtgccattaatttagtaaatatataaaatctaggctcttatgtattctataatttatgaatatagagaaagttcacaatatgctgcagctgtttttcattgttcaaataattgctatttttgagaattagacatttaataaaaatgccaggtgttccttgtcctcattcttccatatttgtcttatatatgtttagcaaaataattgagttaaatatgagcttttatgcttaagcgatggctgtgttttcgctcttaataaaattgcaccataaaatttgatttttagtgccaaaattataaaaaggggttgggcttgtttcctcaacctgaacaacttcttaccttcaagatggatgattcaaagaggaataatagggaatttcttagtatgaagttacttggttgttttcttaggaaaacaaaaggtagaatttaacagcatggggcctgatttaaatagaaaataaatgtacagatataatcaactctgctgtcatggggatttcaagttataaatgcaataagtaacatcccctgacttattctatgtacttttgccctaatctactacctattagtctgaaacttgagtttttaaatttaatctctatgtaaaagaggaataaattgaatgcataattaaaatatatgttgtcaattatcacacctttttgcctagactataagcttcatttttcctgttatatccactaaattaatttatgcttgtttttccattaaaacaagttactttggctgggtgcagtgactcccgcctgtaatcctagcactttgggaggctgaggtgggcagatcatgaggtcaggagttcgagaccagcctgtccaacatggtgaaaacctgtctctactaaaaatacaaaaattagccgggcatggtggccggcacctgtagtcccagttgcttgggaggctgaggcaggagaattgcttgaaaccagaaggcagaggttgctgtgaaccgagatcgcgtcactgcactcctgcctgggcgaaagagtgaaactctgtctcaaaaataaataaataaataaataaataaataaataaataacaaaaattagccaggcatggtggcgtgcacctgtaatcccagctactcaggaggctgaggcaggagaactgcttaaacctggaaggcagaggttgcagtgagctgagattgcaccattgcactccagcctgggtgacagagcaagactccatctc

SEQ ID NO: 424 - DNA, 2228 bp, Homo sapiens
  misc_feature 2055,2076,2140,2171,2172,2174,2190: n=a,c,g, or t
tcagaagaatagatgaagttgccattcaccaagaaggcagagccgccgacttgggcacaattaaagaagctgacacagttagctaaaaaaggccttgagaacacaaaggtgacacaaactccagagagtatgctgcttgcagctttgatgattgtatcaatggtggtaagtctccccatgcctgtaggagcagctgcagctaattatacctactgggcctgtgtgcctttcctgcccttaattcgggcagtcgcatggatggataatcctattgaagtatatgttaataatagtgtatgggtacctggccccacagatgatcactgccctgccaaacctgaggaagaaggaatgacgataaatatttctactgggtatcgttatcctcctatttgtctagggagaacaccaggatgtttaatgcctacaatccaaaattggttggtagaagtacttacttactgtaccaccagtagattcacttatcacatggtaagcggaatgtcactcaggccacaggtaaattatttacaggacttttcttatcaaagatcattaaaatgtaggcctaaagggaaaccttgccccacggaaattcccaaggtatcaaaagacacagaagttttagtttaggaagaatgtgtggccaatagtgtggtgatattacaaaatgatgaatttggaactattatagattgggcacctcaaggtcaattctaccacaattgcacaggacaaactcagtcatgtcccagtgcacaagtgagtccaactgttgatagtgacttaacagaaagtttagacaaacataagcacaaaaaattacagtctttctacccttgggaatggggagaaaaaggaatctctactccaagaccaaaaataataagtcctgtttctggtcctgaacatccagaattatggaggcttactgtggcctcataccgcattagaatttgatctggaaatcaagctatagaaacaggagatcataagccattttatactatcgacctaaattcaagtctaacggtttctttacaaagttgtataaagcgcccttatatgctagttgtaggaaatatagttattaaaccagactcccaaactatataacctgtgaaaattgcagattgtttacttgcattgattcaactttcaattggcagcaccgtattctgctagtgagagcaagggaaggcgtgtggatccctgtgtccatggaccgacagtgggaggcctcgccatccatccatattttgactgagtctgcaggtgtacccaacagctccaaagagacagcgaccatcgagaacgggccatgatgacgatggcggttttgtccaaaagaaaagggggaaatgggaaaagagagatcagactgttacccgtgtctatgcagaaataagtagacataagagactccgttttgttctgtaccaagaaaattcttctgccttgagatgctgttaatctgtaaccctagccccaaccctgtgctcacagagacatgtgctgtgttgactcaaggtttaatggatttaccaaagggctatgcaggatgtactttgttaaaaaaaagtgcttgaaggcagtatgcttgttaaaagtcatcaccattctctaatctcaagtacccaggacacaatacactgtggaaggccacagggacctctgcctgggaaagccaggtattgcccaagatttctccccatgtgatagcctgagatatggcctcatgggaagggtaagacctgactgtcccccagcccgacatcccccagcccgacacccgaaaagggtctgtgctgaggaggattagtaaaagaggaaggcctctttgcagttcagataagaggaagtcatctgtctcctgctcgtccctgggcaatagaatgtctcagtgtaaaacccaattgtatgttctatttactgagataggagaaaaccaccttagggctggaggagagacatgctagtggtaatactgctctttaatgcaccgagatgtttgtacacgtgcacatcaaggcacagcaccttttcttaaccttntatacgacacagagacttttntttacatgttttcccgctgaccctccccccactattaccctatagtcctgccacatccccctcnccgagatggtagagataatgatcaataaatnntnagggaactcagagacncgtaagcaccggtcccctgggccctcttttctttctcc

SEQ ID NO: 425 - DNA, 1716 bp, Homo sapiens
tgcagatttcaacagtaactctggaaaactgtgaaaaatgttatttaaaaatatatatgtatatgctactgcacagtttcaaagatgtgattcataaataatgttggctgcactgattaattttataacaattactgcacttccaagttgatgcgaacacgcagtgactcatactcaatattaggcactagtaatatccttcaggcgtactacagttttatgttagctgtattgtacatatatatttttaaatgtatgcatttatacaaactgtgtatattatgtatggggtgtcagaaatgtacacatcactgttatataatacacacatcattgttgtacatatgaggataagttttagtgcagaaagtctcattgcattgcattccatgtgttcaatctatacacaatttgtcaactcttcagattatttttccagtacattcctcattagattgtgggtttcaagtttccatttgcaatttgaatgtttccagaaatctctgtcttaaccaaacctctctctccaggcacgattctgcacatgagtctgatctgtgtagagtagtatcatcaaatatgccagattttgatcaggaatatacctggactactctctttcaaaggcaattgaacatcgtgataaaggatagcatctattcaggtcatggaaggatatggtcagttgaacttgtgattgaactttggaggcaaatgtacgtcttcaaataaaaagacatggtaataaaaattatttgcttaaatttgagagtctctggaaggatatacatcaaactgtgagcagtggttgtctcaggcagaagggacaaccagggacttacactttctactttctacatttctgcactgtttgagtttttacaatgagtagatattacttttctaattagaaaacacaagaaaggtatttcaacttgaaacaaaactaaacaggccaggcatggtggctcatgcactttgggaggccgaggccaaaggatcgcttgagcccaggagtttgagaccagcctgggcaacatagtgagacccccatctctacaaaaaaaataaagaaaaaattagccgggtgtggtggcacgtgcctatcttcccagctgcttgggaggctgaggcaggaggattgcttgagcccaggagtttgaggctgcagggagccatgatcgcgccaccgcattccagcttgggctacagagccagacccggtctcaaaaccaaccaaaccaacaacaacagcagtaacaacaaaactaagtaaaaggaacaagttatgaatgactttcacaagcaacaattggaggatggttactaaccaaaatcacccatgccaaaccccacagaaactgctgtaccaacgtgctccacacgtgctccacagatgaaacaagacagtcataagaactacacgctctgaccactgcccacaacggtaagtttcaagaagttttcctgggaaatgtgggccatcagagtgctgataaaacactgctggcccacctgtcaaatggggcttcacagggaagctcatcacatagatgttacaacaaagtctgcaactttcaaggtgggcaggaccagagaagctctccaggtatgcaggatagacctccagggccatccctttatgtgtttgaatatttcatcaggattcttcaagagtaggtagaacaaagcctcagtcctccaaaaaaatgactc

SEQ ID NO: 426 - DNA, 980 bp, Homo sapiens
tttttgttgggctgtccttgtgtattttcaccccagcctgtagtcctcctcacttcaaccccagggatttttggggagcaagggtagccaatggcagagggggttggggctgggactctggaggctcctccccttctttctcttccttccgcctcccccgtgcccccagctgctcttgtcactgtctctgatgggtatttgcctggctttgttgcttctctatctgtatttagctgcagtgatcctttagctggttggctcagaaaaaaaaaaatgtgctttaggtgccctgtaatcctgggcatcaagggaatccatccttcccctttttgatatgttctccccgtacttccagatttattgttatggctcccagtgggtattggcgattcttgtgatgcagggcctcagtcagtgtccagccatgcataagggagaggatagtgtgtacctgccctgccctctgctatgaaggtctctgccttgtggatcatgggactccccttggaggatctgtgcaaaggggggctgggcacaaaggagaatgtcctatttgggagggcaggaagcaaaggaactggacagggattggtgggcttggggaacggaagtttatcttggatacccttgatgaagaggctgggtctcttcacatgaagatcgaaaagggaccctgcttccaatttccctcttccattcctcgagctactccagggcttagaagaatgctcttggtctgtgggtccagtgttgtctgtcatccatttaagtgttcccactttcaagtgacaatcctctccttggccctgccatagggcagagcatgtctggcatagcagcctgacttttatgccctaatcttgagttgaggccctatctgcacaggagtgaaagagatgtctttatatctgactgtatataaatgaagtttttttgttttttttgttttcctttttggtgcaataaagtttgttttggcg

SEQ ID NO: 427 - DNA, 1578 bp, Homo sapiens
caccacgttctggggcctcgtcggcatcgccgggccctggttcgtgccgaagggacccaaccgcggagtgatcatcaccatgctggtcgccaccgccgtctgctgttacctcttctggctcatcgccatcctggcgcagctgaaccccctgttcgggccccagctgaagaatgagaccatctggtacgtgcgcttcctgtgggagtgacccgccgcccccgacccaggtgcccagctctcggaatgactgtggctccactgtccctgacaaccccttcgtccgggaccctcccccacacaactatgtctggtcaccagctccctcctgctggcacccagagacccggacccgcaggcctgcctggttcctggaagtcttcccagtcttcccagccagcccgggccctggggagccctgggcacagcagcggccgaggggatgtcctgctccaatacccgcactgctctggagtttgccctctttcccaaggagatgctgctggggagctggtatgggtggggtctttccctttacagacggggcagatgccaggactcagcccatcctgaggaggacacgtgtcctcatggagagggtgctccggcccaggcgggggagtcggtgcccagtcagcagctctgccaccatcctgctgggaactgggggggcctctattgggttataggcaaggccttttctctggcatggaattgttaattttctgacacgtctagatgtgaaatttctgaaaatgttgaagcagagaaacattcacacacaaaaagcaacatagtcatgtgggtccagatggcctcagtcctagatgttggcaccctttgctgtgtctcctcagagtatcctgttccgcctcctgccacctggacctccctcagtggatgtcttccctcccccgaccccagcctgtcagtccgagcacagtgcaagtttggctctgacttgggcctttggctgcagtgggggtggatttcagagcctctcatggcagcatctaagtgaccagagctgggatgagagaggggaaggggcaatgtgagtggcgctatgggacgggccagacctgcttctgagccaggcccgcctctgcccctggcctgggctctgtgctagggatggtgaagaatggggcgtgccagcctggcaggagtgggaagcaacacgcaggggtcccggacctctccagccttgccctcacgcttatccgagctcccagtgtggttagcacagagctcacccaccttgcctggctcccagctggggcctgtcctcactggtgctccaggggaagaaacgacagcctcacttctgtatggactgctgatgtggcctgccatcctgttcagcgggcattgtctttggagcagcaggagactaggatgcctctcactcacatgccagttcctggctggccagctgctcagggctcaggctggggcctcccattgacatcctccccctacactccctctctgagcctccgtcgcccctcctgttgggtaagggtgttgagtgtgacttgtgctgaaaacctggttcatatataataaataatggtgatg

SEQ ID NO: 428 - DNA, 1257 bp, Homo sapiens
  misc_feature 860: n=a,c,g, or t
ctctgccatagcagatttatcttcaactatgtttatcatccaaaaggtgctaggatagatgtttctatcaatgagtgttatgatggctcctatgcaggaaatcctcaggatattcatcgccaacctggatttgcttttagtcgcaacggaccagttaagagaacacctatcacacatattcttgtgtgcaggccaaaacgaacaaaagcaagcatgtctgaatttcttgaatctgaagatggggaagtagaacagcaaagaacatatagtagtggccacaatcgtctgtatttccatagtgatacctgcttacctctccgtccacaagaaatggaagtagatagtgaagatgaaaaggatcctgaatggctaagagaaaaaaccattacacaaattgaagagttttctgatgttaatgaaggagagaaagaagtgatgaaactctggaatctccatgtcatgaagcatgggtttattgctgacaatcaaatgaatcatgcctgtatgctgtttgtagaaaattatggacagaaaataattaagaagaatttatgtcgaaacttcatgcttcatctagtcagcatgcatgactttaatcttattagcataatgtcaatagataaagctgttaccaagctccgtgaaatgcagcaaaaattagaaaagggggaatctgcttcccctgcaaacgaagaaataactgaagaacaaaatgggacagcaaatggatttagtgaaattaactcaaaagagaaagctttggaaacagatagtgtctcagggtttcaaaacagagcaaaaaacaaaaactctgaaaagctctaccccatgttatggacaaacactgaaattacattttngggaattcatcctctaagaattatgtttttgtttttaatcatatgttccaaacaggcactgttagatgaagtaaatgatttcaacaaggatatttgtatcagggttctacttcacttcattatgcggcattacatgtatatcacttttattgatgtcattaaaacattctgtactttaagcatgaaaagcaatatttcaaagtatttttaaactcaacaaatgtcatcaaatatgttgaattgatctagaaattatttcatatataaatcagaatttttttgcatttatgaagcgcgctgtttttctactttgtaattgtgagacattttcttggggagggaaaattggaatggttcccttttttagaaattgaagtggtcttcatatgtcaactac

SEQ ID NO: 429 - DNA, 1151 bp, Homo sapiens
tgactcactgggtattagtcctgacctgcttcctgaggactttgtcaggtactgcttctccgagatggccccagtgtgtgcggtggttggagggattttggcacaggaaattgtgaaggccctgtctcagcgggaccctcctcacaacaacttcttcttcttcgatggcatgaaggggaatgggatttgtggagtgccttggccccaagtgaactcaagatttggcagccccagagatgccaactgcagcatgcccacctgtattccctgtccccttccttcatgaaggcatctccaggcaaggaaaactgaagtcattggcccgatacaaaacatttcctgcaacgaaggaggtggtgccgacgtgctgcttcccatcaccagcagctgctcgacaaggggcgcagggtggctgtctttgttccagcactgttcaggctgcctgtcatcccgggcctgccagctcccctgagtgatgagcacttccaagcacccctctgccctttctctgtccttatgctgtcccggcctcgccagccctctggggcattgtgggagatgcctgccaggaatgagcaagctctgttgctcgggagcctcttgtcaccttcttggacttattccccacctgataccttatagagaaaagtgtgaattcaggtggagagtaggcccaggccccatgaggcaccagtggaagcacagctccaagttcagacaggtgcccttagagaggaaaaccatgacaggcaaatgcatttcctctggagtttgagaccctgacaaacaacaggtggcatctggtgtgctgttcttgagttttcgtttaggattagttgagttccagctgggttttgggagaaaggagatgctaccaagtcttggatgttagggcgagaccctgcaagttgagtattagagagcttgtctttcaaggcaggttcctggggcttcagggctaggagggaggagcctgcccttttaacagaaccccagtcacatgcggctcaagtcactcagaggctgttgcatttcagggctatgttggtcctttgtttacctcctaaaccacagctgtttgtgtttcacatatgttgtgaattttccttggttctttttaaaggaatgctaataaagttacttgctttagg

SEQ ID NO: 430 - DNA, 1698 bp, Homo sapiens
cggagctacccaggcggctggtgtgcagcaagctccgcgccgaccccggacgcctgacgcctgacgcctgtccccggcccggcatgagccgctacctgctgccgctgtcggcgctgggcacggtagcaggcgccgccgtgctgctcaaggactatgtcaccggtggggcttgccccagcaaggccaccatccctgggaagacggtcatcgtgacgggcgccaacacaggcatcgggaagcagaccgccttggaactggccaggagaggaggcaacatcatcctggcctgccgagacatggagaagtgtgaggcggcagcaaaggacatccgcggggagaccctcaatcaccatgtcaacgcccggcacctggacttggcttccctcaagtctatccgagagtttgcagcaaagatcattgaaggagtaaactgagtcacagagaagtgatgtgacttggccaggatcatgcagctggtcggggtggagccaggctttgaacctgtctgtcctgctccagagctggtattcatgacgggtgtgctgcaaccccctccttctcacacagagaaccagatggtgtctgtgtgttacgcgctggacacctaattcacgatccccgccgaaaaccacttcgggagcattatgaattccattgtgtcctccacccccaaggataggttgggatcctgaacccccatccctcagcatgtgacttcatttagagaggaggagcgagtggacattctaatcaacaacgcgggtgtgatgcggtgcccccactggaccaccgaggacggcttcgagatgcagtttggcgttaaccacctgggtcactttctcttgacaaacttgctgctggacaagctgaaagcctcagccccttcgcggatcatcaacctctcgtccctggcccatgttgctgggcacatagactttgacgacttgaactggcagacgaggaagtataacaccaaagccgctactgcagagcaagctcgccatcgtcctcttcaccaaggagttgagccggcggctgcaaggctgatgggaggccaaacggtggatccagaacagagtcagcaaaagtagagcatgtggaccacgctgcccgcttctggtgcctgaagcagacatcactaatcgatcgttcttctgaggattgtctgttcatcccaggtggtctagtctgcctggatcagatgtccttccctgctgctgttgggcaggcagctcagccttttggctccagccagctctggtgtgactgtcaacgccctgcaccccggcgtggccaggacagagctgggcagacacacgggcatccatggctccaccttctccagcaccacactcgggcccatcttctggctgctggtcaagagccccgagctggccgcccagcccagcacatacctggccgtggcggaggaactggcggatgtttccggaaagtacttcgatggactcaaacagaaggccccggcccccgaggctgaggatgaggaggtggcccggaggctttgggctgaaagtgcccgcctggtgggcttagaggctccctctgtgagggagcagcccctccccagataacctctggagcagatttgaaagccaggatggcgcctccagaccgaggacagctgtccgccatgcccgcagcttcctggcactacctgagccgggagacccaggactg

SEQ ID NO: 431 - DNA, 571 bp, Homo sapiens
cctggacgaggtcatggctgccgctgcccttacaagcctgtccaccagccctctccttctgggggccccagttgcagccttcagcccagagcctggcctggagccctggaaggaggccctggtgcggcccccaggcagctacagcagcagcagcaacagtggagactggggatgggacctggccagtgaccagtcctctccgtccaccccgtcacccccactgccccccgaggcagcccactttctgtttggggagcccaccctgagaaaaaggaagagcccggcccaggtcatgttccagtgtctgtggaagagctgcgggaaggtgctgagcacggcgtcggcgatgcagagacacatccgcctggtgcacctggggaggcaggcagagcctgatcagagtgatggtgaggaggacttctactacacagagctggatgttggtgtggacacgctgaccgacgggctgtccagcctgactccagtgtccccccacggcctccatgccgcctgccttccccccgccggagctgccagagatgctggagcccccagccctgcctagtccctt

SEQ ID NO: 432 - DNA, 1269 bp, Homo sapiens
gtgaaatttaagtcagtaataattgacttagcccctttctcctcagctatcaatgtaggttgagatttttaggtctataaattgtattgttaaaaaaaaagggatagtaatgatgtagtttttaacttcgtgatactatccatataaatatgaaaattttcagaaacaagcttaatttatatacatataagaaaaagactgttcttatgcttggccagaaatatacttctttctgtcctgtacttttattaggttggtgtttgccaagcttcaggcatttacatcccaccttcatatctaaggctagcatttttagtttgtttagagaatttggattgggtgcgagcaagacatttttgaagtcattcttttaaatagatgttccatgaaggagggaaaatctgaaagaaggaatttcaaagcaacccaagcagtgttttgaaaattctcaagactgaagaataatgactgactagtaggcaggaagcctgcagttgtattgtggtattgttcctccatctcatgcatttgagaactttagtacaaaagaagagaaagcatggggaggggaagaaagggttttaacaaaaaagggggcactttttggagtaaatattctttgcccttctgtttaaatgaaatctaaagccatattattttactttgaaagaaaatgtgtatcataatagaaatgtcctaaactgacatttttataaatgaaagttaattgctgttggtggaaagagcagcatgatcatatgttcagtttcaaaacagaactttgattaaaaagaaatctacatgtgaaaacctttttttcctttttggtacctgatcaatatattttgttagcttgttactttgaaaagaagacttacctagggcagagttcagaataatttgtaagcatgtgctataagctttggacaaatcaatctctctaggccagtttttaaaattttaaaacaaagggtgctctgtatggttttccaaggttccttattttatacaattctataaacttaaggcattatgtggatatgtccattgctcttttacttaaattttgttgattggacataaatgaattaagctctttataccggataaccgtgtgaagttggatgcagctttcagtgctgacttataaaggatttagaggctgggtcccatggctcacacctgtaatcccagcactttgagaggaggatcacttgagcccaggaatttgagaccagcctgggcaacaaagtaaggtcctgtctctgt

SEQ ID NO: 433 - DNA, 1203 bp, Homo sapiens
  misc_feature 1171: n=a,c,g, or t
tttaaatgccactaaattttaaattcatacctttccatgattcaaaattcaaaagatcccatgggagatggttggaaaatctccacttcatcctccaagccattcaagtttcctttccagaagcaactgctactgcctttcattcatatgttcttctaaagatagtctacatttggaaatgtatgttaaaagcacgtatttttaaaatttttttcctaaatagtaacacattgtatgtctgctgtgtactttgctatttttatttattttagtgtttcttatatagcagatggaatgaatttgaagttcccagggctgaggatccatgccttctttgtttctaagttatctttcccatagcttttcattatctttcatatgatccagtatatgttaaatatgtcctacatatacatttagacaaccaccatttgttaagtatttgctctaggacagagtttggatttgtttatgtttgctcaaaaggagacccatgggctctccagggtgcactgagtcaatctagtcctaaaaagcaatcttattattaactctgtatgacagaatcatgtctggaacttttgttttctgctttctgtcaagtataaacttcactttgatgctgtacttgcaaaatcacattttctttctggaaattccggcagtgtaccttgactgctagctaccctgtgccagaaaagcctcattcgttgtgcttgaacccttgaatgccaccagctgtcatcactacacagccctcctaagaggcttcctggaggtttcgagattcagatgccctgggagatcccagagtttcctttccctcttggccatattctggtgtcaatgacaaggagtaccttggctttgccacatgtcaaggctgaagaaacagtgtctccaacagagctccttgtgttatctgtttgtacatgtgcatttgtacagtaattggtgtgacagtgttctttgtgtgaattacaggcaagaattgtggctgagcaaggcacatagtctactcagtctattcctaagtcctaactcctccttgtggtgttggatttgtaaggcactttatcccttttgtctcatgtttcatcgtaaatggcataggcagagatgatacctaattctgcatttgattgtcactttttgtacctgcattaatttnttaaaatattcttatttattttgttacttggc

SEQ ID NO: 434 - DNA, 1207 bp, Homo sapiens
ccagttaaaaaagaaacaaaaacaatttttttaaacccttgcaagagcaaagaaacaaactcaaactagctcttcaatataactgatttagactctttccatgttacaggtatcttgcctgactccaattcatgttacaattatcactgcaaacatcagcatcactttttgtgggactctcttatttatcatcccctgctttaagaatacactgtgttccggttggtattctcgggccccacaactcatagtattccttctggtgttaattgcttgttgatttgccttgttctaaatgcccctatcatggtcttttccaccctaagtagctaaatatattcaacgctgtcaaccattcctcgattcactttatttccctgaaaaaattttttatgtcttcttgcaaaaagaaatcttgtagtatagtagaattaaaccatgctgcatttataaatatttgctctagtgtattgatggctctcttaaaagctgccattcaggccgggtttggtggcgtgtgcctgtattcccagttacttgggaggctgaggcaggaggatcccttgatcccagagttcagggctacaacgagctatgatcaattgagccaatgcactccagccttgaaaaccctgtctctaaaacaacagtaacaacaaacagccattcagagtaaatagtaggtacaaaataaaatactccttattgtatacctagtataatacagaagttaagaacttggtttttcatatgttagtgtgtttaatatgtactctttagtaaacaggtactggtagcccttggcttttatatcattgacttttcaaataactggcacatggaatactatacgtgtcacctctgaaatgccatttatatactggattttgacttacgaacatcatttgatgaatgccttttttgggctgtttgtgttgctgtcttgccaagtaacccccacctgctacagaactgtgactttgccacttttggcaaaaatttcaaaaattatttgggaaattttattgctttttaccttattttaacaaaacaagtggaaaagggggaaatgaaagcctctggttatgggaaagtttattatcttggtataaaattgagacaataatcattagatgtgctgaaagtgatgaatctttattggaagtgctgcatggggttaagctgatgaattgtgaaaaaaattgtg

SEQ ID NO: 435 - DNA, 659 bp, Homo sapiens
cacacgcagagcatgagcagcgcgtgtgcctctgcagtaccgcgttctgctcctcgaaggccacattcatcttccgcaagcgccgaagctccgcctcacgcgctttgttttggtccaagaactcttcagtgaagatgggaacatcgaaggtggagaagccatcgcagtccccacccttgtgtccattcaggagagtgttcatgagcccagagctcgagtcttctttcttgatcttcttctcctggatcttctccgtgcacatcttataggcttcagactgctggtacgcccgcagctccttcatgtactgctgcttctctctctcggcctcatccaggtaccgctgcttttccgttggctgcagcttgctccactcggcgcccagcatcttggtgatctcgggaaagggcagatccgggtggcgcgtgcggatctgctcgcgccgctcgttcaggaagcgcacgtagcccgtgaccggtgccttgggcccattcggcagaatcttcttccgcttcttgcccttgggccagccgcgtttcttcaccggctcctcctcgtgggaccccttctcgcccgcgcgtggaccctcgccgcgctcttgcttgacagtcaccacgaagcccccatgctggcccggagccttgccgcccgccggcgcg

SEQ ID NO: 436 - DNA, 1070 bp, Homo sapiens
  misc_feature 30: n=a,c,g, or t
caaaatgcctctgattacaggcgtgacgcncgcacctggcccatgaaagatttttattcatcacaagtgaagccaacaagtaagtcatagtatgagtaattaattattatactggagtgtgaatttgaagcctgtgcaaggaacacacccatcagaaagtttgtgaatgagccacaccatggcccagagtctgtatcttcctgcagcctctgcttccctgcctgtcacccacctcaaagtagctctcatgaaatgatcatttgttattattcttcatcactatttaccttttacaaatgttattaagttcatgtctgaaattgctacaatagtgatgtcattgacacctatggtgaaaaattatattttatggcagatattattttacaagcttctgtaagtttctttggtcctgtatttgtcacatcattatggacctgaagatgtgcccactaatgaaatattttgttacaatttgttgagttttgtggggaaacttgtctgctcttgcagtttgttcaaatttggcatcaagaatgtttctggatatattcccctcccatgtcaagggtttttagtacaaaaaaaaaaaaaaaaaaaaaaaacccatgttctggtattaccacagaaagtgaaggtacagaaattaggaagtaaacacaaatatagcacactaattgtaacttgttacatttgtagagcattttatgttctgagtgtttgagcaatcaccactttcatcttccttttgagagaggaagaaacaatgttactctgctcattttataaataagaaaaggcagctgggcgcggtgctcacgcctgtaatcccagcactgtgggaggatcacctaaggtcaggagttcgagaccagcctgaccagggtggagaaaccccgtctctcccaaaaatacaaaatttgccaagcatgatgtcacatgcctgtggtcccagctgctcgggaggctgaggcgggagaattgcttgagccctggaggtgcaggttgtcgtgagccaggatcgcgccattgcactccagcctgggcaacaagagcaaaactctgtctct

SEQ ID NO: 437 - DNA, 1573 bp, Homo sapiens
ttttttttttttcactcttcttcacatatgctatactctagtcatactggttttttttcttttttctttttggagacagggtctcactctttcacccaggctggagtgtagtgggaggatcatggctcactgcacatactgcttgtcttgatgtttcttgcacaccccaagcttgtcttgcttcaagatcttacactaactaccctcttctagggtgctcctccaccagattttttgcattattggctgcttctgaacattctggtctcttctcaaatgtcacctcctcagagaggctgtcctcgaccattatttttaagagtatcccctgctctcctgcctctcagaccctacttatcacaacctcctttattttctttattttacttactgttatctaaaactacagtatttctttgtctgtttatttgtctgctttctcctaccagaatgtaagagactttgtctcatcacccgatttctcctggtatctagaacactgcttggcatttctgttggtgggttgaatgaataaatgaaatgattaaaaaccaaaacacactaaataaatttataattcaagaaaaagcaacttgaaattttacaaaactaaaagaaatctgaaagcgtgatatgaaataaaatatcttcaaagcaagacaaatttaaatccacttgaaagctctaaattagttgtaaaaatagtctctccaaactaggcatttgagaaaaacttcataatacttaaattcccaaattaaaagtttaaaatgaaaatgacaatttacttctaaatatcaaagtgctacaatgttaacttcagaaatttaatgaggcaatattacttctttggtaaactgtgactcttaaaaagccacgttaagcatatacaaagatgtcaaaaaatcagttattaatactacagaaatacttttttaaataaatgcattttttaaactaacatgatttaacaaaaggatctctaaccttccaatgatcttgaaagataggcactattttcccctacacatataatgaagatatacaggccattcttccgtatgtgaataattaagacctgggttagaatctttcctatttctatcatattttcctgaaatgcatgatcatctatgtggttagttcttagtaaactacagtagtaaacaacttctagtgttattgcaatgaggcacatttgtgtactctatagcaaagtactggcaatccaaatgacttggtaccacttacactttcacttccaccaagacataagagggtcagagtccgacataaaggtgttgagtctttctgattacaatgccattgccaagtatataagcagttctgttcagagataattttcacactcaacaaatatattctggtaggtcttcactaaattaagattatttaacacaatatctaatctatttgttaagaaatgagagggaatgacaagcacagaagcccagagacacgagattgtttagaggagcaaacagcaaggagaccagtgtgactacagcagagtcagcagagccagcagacctggagatgagaaccttagaaa

SEQ ID NO: 438 - DNA, 1843 bp, Homo sapiens
  misc_feature 1793: n=a,c,g, or t
gtgtcattgcaagctttctctgctgtcaccagtgaaacatagtgccctgttaaattcccccactttaacttccttgtgatcaacagtaactggatgtttttgaggtgctcaattggaataaaaatattccaatctatttggagaccaaaggcaaaatcagttttcttacctttggaattattcgtaccttttatggtaaatttcagctttgacatgtattatgaggaacgtaccaaaaaccggtttgtaacaaatctgtagagaaggtctgaatctatcgtgtttgccttttcaggtgccatttctactgcctaatacagtgccatttgccttgtgaagacccataaacattcattgtgttgaatgtaagagagagactctccctagtcttactgatctcagtaccccacattcgattaagaatgatatgaaaaccagcagctaaggaacatcttattatttagttgtagcatattcataacaagtgtccttcaaggataaacatatattctctatttgtatttagcaagtaaaacttgtgttgacctttagtgcattatattcagcttttaacagtattatgtatgtactggaaagcaaagaaatcttagagtcttggacattgtttatttgtgcacaactagaaaggagcaatgaagtttatttcagttgtatttttccctaagcacaatctgcaatagtttatgtatgacagagataattcaaaaaggaaaactatatataaaagttgtatataaagtttgtctctgaaatatttctttgaagtttttaaaaattgactcatgtttaaaaacaaacacacactattcagagcattggacttttttaacttgttttcatctgttatcatgacttttttatttctggtgtagagtccacattatttagtttgttgtacttttaaatttcaaagttcaaatctgaagaatagcgtttgtgatttcgggaaaccatgcagtggttttaatcccaggaaaaaaactatcaacaaaagttcgtttgattctcattatgtaactttgtagaccatcctttctagatgggtccaccacagtgaatttgtaactttgaagtcaggatagaatatcattagattatctgtgagatagcattactatgttgggaccagcagagtttgggttggtaaaaataatgtttgctctattactgggttacagacatttcagcatttttaggttggttttaaatcactaaaaatatttattcggatttgaaggatttaagtgctaaaaatcaatccatttcttgcccttcaataattgtccatgcctgccttttgttgtttacatgctcttctgcccagactgttagtaatctagggaccccctttggagctgataagtacagttcagccttttctcctcaaatatataatgactttaccattcctaagaatataggtatttctgaatgatttaaatttgaggaattttaatacataaaatacaatgtacaaactttctgcccactcagatctcttctccatcatgtacttagtatttcccattaacctacacactgatttttatgctactccttgtagaaacaaaattctggtttgactcagtttttgtgtttataaacttttggaatgtgtcccccgtttatgtgaagaattatgacctttcagtcatagctaaatagtgaacctcaaaagtgttaacttttgactattcatgtgaggtttggtttcttgcatttatgtacatggctgtaaattatgtgcatttactctgtatttatgttatctngctgacttttacttgaattgttcaaattttaaaaattaaaatacgctcat

SEQ ID NO: 439 - DNA, 1622 bp, Homo sapiens
  misc_feature 1113: n=a,c,g, or t
tgtctctactgaataaatacaaatggttccagcctatcaggactgcactctcttctcggctgcactaaagctggcactcccccagccgttctcatgcaaaatacctgtgtcagaatactcctttcatccatcactcagccagagtcttcaggacagactccgcatgggacttgtccaaaaaaattctaatcaaaagaggaaaattttggaatatgccaggaatagtggaattttattttttaaatttttttataggcccatatgctctatctcaagaaacaagatgattgtaacatgtccatgattaaactattggcagattattgctgtgttaatctctgtagtctaatgagttctttgttctgttctgctgccttttacgttttcttgtcctttcaaaagtgttcttgaaagaaacaaagcgaataggcagttagcacagcacagctaccccttaccaagcagtctatggaaacaacccctcatccaaatcatgggttagttaagaatctaactggggcaattaagatgaattccactcacttcctggtcacttcagcagcccagcggcattgagccaaaatatacaattctgtgttattagtgaggaaactttaaaactcatgtttgttattacttactacccaatttcattatcctcccttcctctttccatttctattctctctcacttgaattctggcattatttttagtggcctctactgataatacctaccctagagtacataaaaattatattaaaagaggaagtagcagtatgcataattttaacagattctataatgggtgcctcaaaatatgtattgtgccattccgcaaatttaaaagctaattgaggacaatttttttttaatttcctaaatgagaccaccttggatttttatttttgccatttagatgtttatacttatttagcttttataaaacataagccaagctaaatcccacataacaactctggtattcttccctcatatgagcagtgattttatttgttacccaccttagatagactaagaaagttctagtcttgtttctccttctccccgcttccctggggtttttccttaccataagtattctggtccgngggttcagttcctttagtcaagatgtcacaagtttaaaaacaaaacttgagaaactaccaaaggctcaggagttgtccactttgttgaaatccattaaattagagaagtctcactaacagatgtatttaaatatgggtccaacaaataatttctttttctccccttccccaaattacagtcagcatttaaagctgtttatggcttgccatcagcattattctggtaggcttgttagtgtttaaatctatttgattttttttttttttttttgcctcttaaagtctaattttaggatggatgaattcagatgtttaccagagtgtgtattttacataatgttcttgattaaaaagacttgtttgtaaattatccgttgtttttgcatatgcccagttgatgtgataaaattttcattgtcttgccatataaagccttggttatcaacaggtggaatgtagatattgtaaagctttttgtgaattaaaagtgcaaaataaagcaaccacat

SEQ ID NO: 440 - DNA, 2172 bp, Homo sapiens
gtcctcttcacccaggccttgaagctcaacccccaggaccaccggtaggtgggggcttggccagggcagggcagagtgttgaggactcagacctttggccaccttctgtctttatcaggttatttggaaatcgttccttctgccatgagcggttgggtcagccagcgtgggccctggctgatgcccaggtggcccttaccctacggcctggctggccccggggcctcttccgcctgggcaaggccttgatgggactacagcgcttcagagaggcagctgctgtgtttcaggaaactctgagaggtgggtcccagcctgacgcagcccgagagctccgctcttgccttctccacctcacactggtaagggggccaggcacactgtcatgctgaggcgggtatcagggagaattggctgggactgcaataccaagcctcaggtggctaaggagggggcggggaaggatgggtggaatgagaggcatgggctgtcctgcttaaaagaaggatctggtgcccttctctctcccttctcagcagggtcagcgaggaggaatctgtgcaccacctctgtcacctggggccctccagccacttccccatgctgagctggcaccctcaggcctaccttccctcaggtgccctcgaagcactgctttgaggtcccctggcctgtctccactcttgcattatccttcatgtcaccgaagccaccccaaccagcccctctcccagactcagagtagaaggccccatcctctcaagccccaggacccttcaaagggctgggacatcctgggacttgggctccagcatctgtctcaggccagatgagggggcaccggtccctcatagggcagggccatgtatatatcccttggtgggggacatagtgtggtgacagttcactgcatattttgagaccttattctctagatccatagttaatgatgccctggcagtcattcctcttgccatggggaagcttctgatgagagaaaggagccccacatccactgaaacatcctttggttctcaagcttcttctggaggcagtaaggaaaaataaaacccaccaaggctcaagaagggaactatagaaaagttcaggtttttaggctatagcagagacagtgagaaagcatctgggcctttctcttcctcttggtccaggggacctcattcaccaactagagcttggtgtacaggaacggggtcacagtgctgagggggcttgagtcccacctttcagcttgatggatgctcacctcttctcagccccagctcgtgccctgtttttctagccatagcccccagaatactcacagctcctcatgccatttctgtccacgattgctatgtatgactctgacctctctagtccagtggtctggtgctcacctgctctcactgctagaatattcaccaagggtttgcatttggtaagtcccttaccagctcctgcttagagctggtagggccatacatgtccacactcccaactggtggctctcccgctgaatggggcctcagcaggtgcccaagctgctacaaccttggccactctgtttctccaccccagcactgggcatggtaattagcctttccccatgttaatttattcagttttttcaagggtcaactgaattccccacttcctgggtaagaagcatgatctccttttaatttcacgtctaagatcctggcagcttcccctaactggttcctctgtagtcctgctgggactgtcagctcatttaaatgtgggtctgcagaaggctttaggtctcccccaacccccttacctttcacagaggaacctttcatcaggataaatgattattgctgccctgtgggtcttgctcaatactgttcatacctggagagagaaggtattgaaacatctcctttatgtgtgactttcccaaatttttaaaaattgtttatggtttaggccccttaaatactgtgtagcaggatgaagtctaccattaccagctgggtcaccttggatgggtctgtcaacatctaagcctcagttccctcacctgtaaaaatgagggtagtccctacctcataagggatattgtgaggatggaaagcgaaagtgtgagaaaatacctcccaagtgcctggtacatagtgggtgctaaataaaccactttttgtctgc

SEQ ID NO: 441 - DNA, 758 bp, Homo sapiens
ccaacttctcctccgccatgccccgcaacgagcccgccatccgcaactcgctcccaccctgcagccgcgcacagagtgtcggggactcggaggtggccgccatcggccagctggccttcctgcggcacctgacgctcgcacagctgcccagcgtccttacgggctccgggctggtcaatatcggcctgcagtgccagcagttgcggtccctgtcgctggccaacctgggcatgatggggaaggtggtgtacatgcccgcgctctcagacatgttgaagcactgcaagcggctgagggacctcaggtgagggggccgcggggacctctcgggcctctgctggaagctggcggagggaactggggcgttcgcgtggagttcggtggctggcctgccctccaggagtgcagaggctggggcggggcctcgcagcgttccacgtcggtctcggggctctggggagagcggcatctagaggagctgggggtgcaggaggcggatgtctgagcttagtgtctttattcctgatagtgtttgagtgactgcctggccctactatgagtcatcctgtgtaatcgtctcaggaccctgccaggtgcatcattgttgccactcagcagagccagtaggtgggggaggcaggattcaaacccaggcctttctgacctgactttgcaatgcaattcctttttttttttttaatttaaattttatttatttatttatttttgagacagggtctcgctctgtcccttggaaa

SEQ ID NO: 442 - DNA, 1924 bp, Homo sapiens
ggcaaccgctccggcaacgccaaccgctccgctgcgcgcaggctgggctgcaggctctcggctgcagcgctgggtggatctaggatccggcttccaacatgtggcagctctgggcctccctctgctgcctgctggtgttggccaatgcccggagcaggccctctttccatcccgtgtcggatgagctggtcaactatgtcaacaaacggaataccacgtggcaggccgggcacaacttctacaacgtggacatgagctacttgaagaggctatgtggtaccttcctgggtgggcccaagccaccccagagagttatgtttaccgaggacctgaagctgcctgcaagcttcgatgcacgggaacaatggccacagtgtcccaccatcaaagagatcagagaccagggctcctgtggctcctgctgggccttcggggctgtggaagccatctctgaccggatctgcatccacaccaatgcgcacgtcagcgtggaggtgtcggcggaggacctgctcacctgctgtggcagcatgtgtggggacggctgtaatggtggctatcctgctgaagcttggaacttctggacaagaaaaggcctggtttctggtggcctctatgaatcccatgtagggtgcagaccgtactccatccctccctgtgagcaccacgtcaacggctcccggcccccatgcacgggggagggagatacccccaagtgtagcaagatctgtgagcctggctacagcccgacctacaaacaggacaagcactacggatacaattcctacagcgtctccaatagcgagaaggacatcatggccgagatctacaaaaacggccccgtggagggagctttctctgtgtattcggacttcctgctctacaagtcaggagtgtaccaacacgtcaccggagagatgatgggtggccatgccatccgcatcctgggctggggagtggaggatggcacacctactggctggttgccaactcctggaacactgactggggtgacaatggcttctttaaatactcagaggacaggatcactgtggaatcgaatcagaagtggtggctggaattccacgcaccgatcagtactgggaaaagatctaatctgccgtgggcctgtcgtgccagtcctgggggcgagatcggggtagaaatgcattttattctttaagttcacgtaagatacaagtttcagacagggtctgaaggactggattggccaaacatcagacctgtcttccaaggagaccaagtcctggctacatcccagcctgtggttacagtgcagacaggccatgtgagccaccgctgccagcacagagcgtccttccccctgtagactagtgccgtagggagtacctgctgccccagctgactgtggccccctccgtgatccatccatctccagggagcaagacagagacgcaggaatggaaagcggagttcctaacaggatgaaagttcccccatcagttcccccagtacctccaagcaagtagctttccacatttgtcacagaaatcagaggagagatggtgttgggagccctttggagaacgccagtctcccaggccccctgcatctatcgagtttgcaatgtcacaacctctctgatcttgtgctcagcatgattctttaatagaagttttattttttcgtgcactctgctaatcatgtgggtgagccagtggaacagcgggagacctgtgctagttttacagattgcctcctaatgacgcggctcaaaaggaaaccaagtggtcaggagttgtttctgacccactgatctctactaccacaaggaaaatagtttaggagaaaccagcttttactgtttttgaaaaattagcttcaccctgtcaagttaacaaggaatgcctgtgccaataaaaggtttctccaacttgaagtc

SEQ ID NO: 443 - DNA, 2169 bp, Homo sapiens
  misc_feature 699,702,703: n=a,c,g, or t
tgagtgagtaaatctcttttttgctctttgaaaaattttacactattcaatcttttctgcctaatttgaccctaattttgatctcatattgtaatagtgtggaaatattagctcatattttagttaagattgagctctatacttgaaagagaattatttttgaactaggaatttaattgaaccttgatattaagctcactccaagtatgcagtttatctggctttctatagatatattcctgtaaatttttataccttgatattaatggggacttcagtcagctggcataatagaaacaacataaattttggaggcatattgatctgggttttaatcccagaccctatctcattttagttgtgtgactttagtgatattcttcctctggatccatttgctcatgtgtaaaatggtgctaacaatcttggtcatgcagggtttttgatgatcattaaagataatatatgtatcgggagaatggcgtgaacccgggaggcagagcttgtagtgagccgagatcgcgccactgcactccagcttgggcaacagagtgagactccatctaaaaaaataaaaaaataaaaaaaagataatatatgtatcaaaatagcagaggatggaaaaaatataccatgcacccaataaaaaaaaactggagtggatatactgatgatagacaaaatagactttagaatacnccnnttactagagataaagagggacatctcatgttgttaaaagggtcaatccaccagaacgatctaacatttataaacatgtgtacacctaacaacagacctccaaactatttgaagcaaaacctgacataattgaagggagaaatagacaacaataatatttcggggcttcagtaccccactttcagtaatgggtagaacaatgaggaagaatatcaccaaataaatagaagactcaacagtactgtaaacaaattagaccttacagatatctatagaacaccacacccattagcaaaagaagatacattcttctcaagtgtacgtgaaatattcttgtggatagatcatatgctaggccatgaaacaagcctcaataaatttaaaaggattgaaatcatacaaagtgtcttctctgaccataatgaaattaaattagaaattaataacagaaggcaacagaggaaacattcacaaatatgtgaaaattagataacacactcctaaataaccagcaagtctaaaagaaatcacaaaggaattagaaaacactttgagatgagtgaaataaaaagacaacatacccaactttgtgggatgcagctaacactatgcttaagagggaaacttacaaccatagtcatctatattcaaaaaaaatactggggcatggtggtccatgcctgtagttcctagctacttggaaggctgaggtgggagaattttttgagtccaagagtttgaggtcagcctgggcaacacagcgagaccccgtctcttaaaaaaaaaaatcctcaaatcaataacctaacatttcacggtaagaaaagagaaaaagaagagcaaactaaacccaaaacaagtggaagaaaataaacagtaaagactaacaaggaaataaaagaaatagagaattttaaaaaatagaggaaatcagtgaaaccaaaagttgattctttgaagaggtcactcaattgataactttggctacactcttcaaaaagggggaagagattcaaattactgaaatcatgaacgaaagggggatttaactactgcccacacagaaatagaaataattgtaagagaatactctgaaaaactatatgccaacaaattagataatttaaaatggacaactttctagaaagacacaaattcccaaaactggttaagaagaaatataaaatccgttgggcacagtggctcgtgcctgtaatcctaacacttgggaggccaaggtgggcagatcatgaggttaggagttcacgaccagcctggccaacgtagcgaaaccccgtctgtactgaaaatacaaaaattagctgggcaaggtggcgcatgcctgtagtcccagctacttgggaggctgaggcaggagaatcgcttgaacctgggaggcggaggttgtggtgagctgagatggcgccattgcactccagcctgggcaacagagcaagactccatctc

SEQ ID NO: 444 - DNA, 1630 bp, Homo sapiens
  misc_feature 535: n=a,c,g, or t
ggatttttgtttacttgtttttttatcttactttcataatattttggttttgtttaggcaggcagttatacttgcagatcagtcatcccttgagacctgttttttagttttgctcaggcaagactaaaatagctttcagtccagagattgttcagccttaccagagagacatgaataccttggataatcagtaaggcctctccattctggctctcaggagctcgatcaattctaaggcccatgcgagctctgggaatatttagtttagcatgttttagtcattctttgtccagcagagtggaatattgttggtccacatacatggcccaatactcagcaaacgctcaagtagacatactctgtataatcacggcccaatactcagcaaatgctcaagtagacatactctgtataatcacggcccaatactcagcaaacgctcaagtagacatactccatataatcacttcccttccagaactctgcttcacaacttccagctgcctcagcctatctgatctctgatgtttgtttnctcaactccctttcctggctctttttgagtcctcccatcattgcaactgcagtacaaaaattgcctctgtcatagatgatcacagggcttacttcgtttgtttctttcttctcaaggatcatagtcttgtgctgcttattacttaatgcctgaaaataattgctttatatgttttgtccagttttctagttgttttctccaggatttcaagtccagtgcttttactctctcatggccaacggtccctttagtttttatcgtgatgatggtcttaatctccacttctgatcttcattctaatgttgtgctatacattgggatgccttttaaatttggaaaatcatgctcttggaaattttttaggaaacgttcttatgtctttgctaacttcctgtctattgtcatctaaattttcattttctggaatttccgttggatattggatcccttggattgagcctccattttccttggttctttctttcatttgtttgttttggatactgcccatttctttattatttccttatatcttatatgagatttacttgaccttaccttctgtatgagtccactttcacattgccataaataactacctgagactgggtaatttatgaatgaaagaggtttatttgactcacagttatgcatggctggggagacctcaggaaacttacaattatggtggaaggtgaagggaaagcaaggcaggccttacatggcagcaggagagagagagaacaaagggagaagtgccatccttttaaaccatcagatcttgtgagaactccgtcactaacacaagtacagcatgtgggaaaccacccccatgatctaatcacctcccaccaggtccctccctcgacacgtggggattacaatttgagatgagatatgggtggggacacagagtcaaatcatatcatcttccaattattctattgaattttaaatttctatcatatttttatttctaagagcttttctttgttctctacttattcatttttatattactttgctcttatttcacagatgcaatatgttctctcatatcactaatgaggttaattaaagtttttttgcagtctt

SEQ ID NO: 445 - DNA, 1196 bp, Homo sapiens
attccctgtggcagaatttattaaagcccctcaagaaggacacccctccccacccccacaaaaagtaatgcacatgagcagtgctcctcttacaggcaggggcctcactggatgcttcgatgtgtcttaccatggctcacagctgcagacttagggtttccatccttatctgggccttgtgtagtgcctgccagtctttcccagtgtccttggtctgctaccccactagcccttcttggatcaatgttagatctattttttcctagaaaatcattcatttcacataattttaaaatgtattggtattcagttgatcatagtattctcatctaattatttcacattcttctgcagttttgtttcctttctgaatctaatgttgatttgggtctgctaccctttttcgtgattagctatgccaacagtttgtctgttttattggccattttagaaaattagcttttggttttattgagcaagtttctttttgttttctactgaatttctacttttattgttaataattctttcattttgctttctctggatttagaaattataaaacagatttgatctcattggccttcattttttcattagctcttgaagatgttgatctaaacaaagtttacatcctcggtgggcttgtggatgaaagcattcagaagaaggtgacatttcaaaaggcccgggaatactctgtcaagaccgcacgcttgccaatccaggaatacatggtcagaaaccagaatgggaaaaactatcattcagagatactggccatcaatcaagtgtttgatatcctgtccacttacttagagactcacaactggcctgaagcattgaagaaaggagtttcttcaggaaaaggctatattcttcggaactcagtggaatgatgggcctaagattgcagctgcgtggccaggtgctcacgccgttatgccaacactttggtagaccgaagtgggcagatcacctgaggtcaggtgttcacgtccagcctggccaacatggtgaaacccttctctactgaaaatacaaaaattagccaggtgtggtggcgcatacctgtagtcccagctacttgggaggctgaggcaggagaatcacttgaactcgggaggcgaaggttgcagtgagccgagatttcaccagtgcactccagcctgggtgacagagcaagactccatctc

SEQ ID NO: 446 - DNA, 1978 bp, Homo sapiens
gtgggacacaccatcaggaaggggcctggctgaggggacccctaccgcaggcaaactaggaccaactcttggggctggcaccaccaggagcccaggcagtcctccaactccgagagtccatggagacacaggttccccgaggaaaccgtggcccgagcgccggccaccgcggcccgctgcgaccaggacagcgcccccaaccccgtcctcaggtccctccgcctctccgggacccccaggcccagcgctgacctctgactccagtcgagagctcactccccactcagccttgacgtccgaggcgacctctgacgctccggacacttcaccacccaccccagacccggcctcccggacgaaccccgacctcatcttgacaagccctgactttgctttgtccacccctgactccagtgtggttcccgcgttgaccccggagccctcacccacgcccttacccaccttgcccaaagagctgacctctgacccttctacaccgtcggaggtgaccagcctttcccctacctcagagcaggtcccagaatctgacacaaccccagatttggacacaactccatactccagtgcagtctcagaatattctagatccccagacccctccccaagccctcaccccactactacccctgatcccaccatggcccctgaccccatcacaacccttaaccctactgtgacccctcacttccctaccacccctcaccccaccacgacccctcaccccaccaccatcactcactccaccatgattcctgaccccaccacaacccctcaacccttcaccaccatcactcactccaccatgattcctgaccccaccacaacccctcaacccttcaccaccatgcagcccaccacaacccctcactccacaacccctcaccccaccacgacccctcatcccaccaccatcactcactccaccatgattcctgaccccaccacaacccctcaacccttcaccaccatgcagcccaccacgatacctcatcccaccacgacccctcccccaccacgacttctaccccaccacaacccctcaccccaccacaacccctcaccccaccatgactcctgaccccaccacgaccccttaccccaccactactcctgatcccaccacgacccctcaccccacaactctgacccttctcaacccctgtgatactactgtggccttcaacctccttggggaagaactctgctctccactctagcaccaacagtcaagcccagtctgcacccccagttgaccttcacagcacctgcccctcacacctccacatcccagatacccaccttagagccctctccagccttggagtccagcccctccaggtcctccacagccacaagcatggacccactgtccactgaggacttcaagccacccagaagccagagccccaacctaaccccttcacccacccataccccacactcagcctctgaccttactgtgtgccctgacccccttcttttccccacagaccaccccttggatcatcctacccttgactccctcaccctagggccaactcctggcagagcccatgcccccatggtccatgtgtggccccaacaccacctgtaagggtcatggcttgtgagccacctgccctggtggagctggtggctgctgttgagggatgtgggtggtcaactgcagaagactgacccaggtcgtggaacaggagcggcaggagcgccaagccctgctgctggggctgacgcagctggtagaagctgcccggggtctggggcagctgggtgaggctgtgaagagactggcagagatggcctggaccaccagcatgcctgcaccaaccaccactaccccagaggaagaagaaagacccctgaggggagacgtgtgaccctctccaggatttgaggggcttaagacacccccaaccaaaaaaaacaaaaacaaaaaaaaaccccaaagtatctaatt

SEQ ID NO: 447 - DNA, 1404 bp, Homo sapiens
caagttccccgagcctaacggacagcctgaatgggaattcaagtatagttgggagacttttggaatatgtctatacccattgggaacatccattggatgctctgagacaccaaaccaaaatcatgttcaaaaaccttctccaaatgcaccggctcactgtggaaggtgcagatttcgtccctgatcctttctttgtggaattgactgagagtcttttacgattggaatggcatattaaaggaaagtacacgtgccttggttgtttggtagagtgcataggagttgaacatattttggctatagataaaactattccatctcaaatcttagaggtgatgggagaccagtcattggtaccttatgcaagtgacctcttggaaaccatgtttagaaatcataagagtcatttgaaatcccagactgctgagagttcttggattgaccagtggcatgagacttgggtttctcctctcctttttatattgtgtgaaggaaacttggatcaaaaatcttacgtgattgattattacttgccaaaattattaagttacagccctgaaagcttacagtacatggtaaagattcttcagacttctattgatgctaaaactggacaagagcaatctttcccatccttagggtcttgtaatagcaggggggctctgggagctttgatggcatgtctgcgaatagctagagctcatggacatcttcagtctgcaactgatacctgggagaacctcgtgtctgatgcaagaataaagcaaggcttaattcatcagcattgccaagtaaggatagatacattaggcttgctttgtgaaagtaatcggagcacagaaattgtttccatggaagaaatgcagtggattcagttctttattacatacaatcttaacagccagtctccaggagtgcggcaacagatctgttctcttcttaaaaaggtagaatttcccatcagaaggcatagggaagtggtgaactttgtttgggaaatcgtttttaaaaagagcccagattttgggagcgtgtgggaatggtcatggaattgggctaccacatctgttcatgacggccgttctgtgacctgttctctcattccataaagcttacatttgggattaaaatccagagtgaaaagcacgcacccctccccccaccattttttttcaggagttcagaatcagcctgggcaacacagtcaaaccccatctctactaaaatacaaaaaaattagccggttgtggcagtgtgtgcctgtagtcctagctatttggggggctggagcaggagaattgcttgaacctaggagcggaggttgcagtgagccgagattgtaccactgcactccagcctgggcaacagagtgagactcggtctccaaaaaaaaaaaaaaaaaac

SEQ ID NO: 448 - DNA, 1293 bp, Homo sapiens
  misc_feature 1253: n=a,c,g, or t
gttacttcatcaagctaaatagcagccactaaatggagaaacatctaagatagcagggatactgttggaatagcagaacagtcttaatagtgaagcttcttttagaaagcagtatatttgctggcatccttctagaatggaaaaaataatactaggctctaccatttgacctggctgtgccaaaacatgtaagcagcttttccacatctgccccacatctgtaccctatatttttacccagagagaaaacacaaaacttcaaaagtgtaatgctcggaaggctactggcattgccctttgctgtgagggcagtttcttgtccttcaggtcaggcagattcttttaaatgcttcaagtaattcgtgtcagtttcaggaccctcctatttgacttatacttatggtttttctccaatttcagagtcgggaagacatcactcatgaaccagtatgtgaataagaaattcagcaatcagtacaaagccacaataggagctgactttctgaccaaggaggtgatggtggatgacaggctagtcacaatgcaggtaagcacatgtcttggctgtgctgaccaggccttgatagttcatttagtcttaatctttcctcatgcatagacattttccttccctgttcttcaaatcttattatcttatttgtagataattggctgatactcagttaaatttgaatttcagatcaatagtgaatacttttttagtatacttctagtgtatctcagatacgacttgctaagacacactaaaaaattcttcttaaaaaaaaactcagatttatcctttcttgttttttgttgtttttggttttgttgtttgctaaatttggcaacctgcaggtctctgtcttgtgcctctcttgacatccttgcccagtgctttaggtaaacatctttgtctcacctcagtagtgagacataaactttatttttctgacttcctatttcatacgtaacttcaagagttgtgtgtctattgagccaatcttttttttatgtatcagcttattaatctttcaagggttccctttcaacagttaggataagatacagattctttcatatgacttgttgaaaagccttcacattctggctataaactattattccctttttttcccccattgagtcattttgtttgtatacatgttttaacatccctagaaaagaaacccctgaaggatggataccttgagcccaggagtttgtgcctgcagtgggctgtgactgctccnttatactccagcctgggtgatggagtgagaccctgtctct

SEQ ID NO: 449 - DNA, 992 bp, Homo sapiens
ttttcttccattactgagaagccagtaatataatgttgggaacagtgagataattcaaagggactcctgggtgggcttcattatattagctggcctaaggtattatgtttccaataacaccccagtcactagaggcactgaactcagtagcagcagttcgcttattgggagtagggttgtgcttccatcttgccagctgtttcaataggaaacacataccagcccttggccatggcctagtgaccctgctttctgtggagtcctaaacccagagaaccttttgtgtgattttctattctgtccatttacctctaactgtgccagaaaattaaggataattttctcttttctactcttagaaaactactccaaatgataagttaattaactcaaattctaaaaaattagaagcagcacttgaaactaagcataacatcctgatctaaagagtctttcatggagtgaattataaatgttattcagactttgttctgttttaatcttttctaagcaggaacatggtgtattctgtgccctctaagtctttctttacagttctaattcaggatgctaattgcctgcattccatctgagtcaatctgtatacggtgtactaatgatcagcatttcttcaacttttcccttttttatagtggtgttaaatgttcatataaaaattagaaaatataggccaggcatggtggctcacgcctggaatcccagtgctttgggaggccagggtgggaggatcacttgcgtccaggagtttgagaccagcctgggcaacatggggaaaccctgtctctacagaaaatacaaaaattggttgggtgtgctggtgcgcacctgtagtccccagctactccagttaaggtaggaggattgcctgagcccggaggtgaaggctgcagtgagttgagataacaccaccgcactccagcctgggcggcagaatgaaaccctgtctcaaaaaaagagaaagtatacctaag

SEQ ID NO: 450 - DNA, 1029 bp, Homo sapiens
ggcatggccgtgcagtgtttagggtgctctgggaacacctataagaagggctacatctatttgggataatgaattagcaaagcttcccaagagcaggtgggggctcagccataagtaccagctggctggctagacaagtcagaatggctctggaatgcctgtctagaggatgcaggtctgtgtgtcttccagaccagactcctcatctcccacttctccccagcaagcaggaattctgtaataggtagccagactctgctgagggctgatgtgcaggtctttaattgagatcagatctccatagactttaaacatcaaacaagcagataaaaagatgagcaatctttggaaatcaaaggcccaaatcaacgaaccccaagctgtccaaggacaccgctgatctgaggtgttgctgctttcttatcttgttctagaatcttccagggccccactctgccttctgtgtcttgtactctcctccctacgattatagttcttcctctctaaaaacccacatgacatttacagcagtcactttaaatgaccaagtgaccatcagcagcacccaaacatgctttcatgggcatgcaagcccagcctttccacgtgggtgcagccacagtctctcagctccctgtggtttggtttccaggggagcgcagaaccattgtctcgtgtacacggattgtcaacaagaccacaactctggtgaacgacagtatctgccctcaagcaagccgcccagagccccaggtccgaaggtgcaacttgcacccctgccagtcacggtaagaagctgggttctgtagcttggacccaccagagtctggggcggcagcaccatcagtggtggggagtgatatgcagttaatgccacagtactgctctatgctgtgttccgttattgttgatgagagatttccgcttgctcaaattaccaaatttccagctactaagccaggactctgatggaaatacaaccttcactggaaggcattgtgtaggagaccattagtaacatctcatggc

SEQ ID NO: 451 - DNA, 1110 bp, Homo sapiens
  misc_feature 72: n=a,c,g, or t
aacataaatgccttctctctttttaataaccgttacccgtagaatatctgaaggactttttgacattttcantagtatctttacaccacagagcagagaataagtaaaaaaacaaaaaaccacacacacacagtgagcaatgcacataggtcttggctccatgtggagcctgccattgtcatgtcctgcctgtgtatgtgccattttggccaactttatgtgcacacatgtgtggggtaatctgggcgtattcagaaaagatatattgcagctaaagggggctgagagggtctttttttccctcagggttgctgaataaactgtgtgtttgtatgcctgcattttgtctgtgaattgtcacatgaggtcaggtgtggaaattcccacatgtggtgtcattttggtgctcagacatcagattttcagattagggatgcccaacctatatatgtgtaatttacttattatttatttatttattgaaatgaagtctcactctgtcacccaggctggagtgcagtggcgctatctcagctcactgcaacctccgcctcctgggttcaagcatttctcctgcctcagcctctcaagtagctgggactacagggactacaggtgcatgcctgtaatgagaatttcagctgaaggataattagaacagttgtcaaggagtaaaaaaatcttgcagtcatcattcagtccagcttctccgcagtgaacctgagctactggtacaaaatgtttgtgagaccacatccggctaatttttgtatttttagtagagacgtggtttcactatgttgtccaggctggtcttaaactcctgacctcaagtgatccacctgccttgacctcccaaagtgctgggattataggcgtgagccaccacacccggcccgtaatttctttattgaaaaatttttacaaggaggcataaagttggagttgacaaaaatgcaaaaattagccaagcatggtggcgggtacctgtggtcttagctacttgggaggctgagacaggagaattccttgaacttgggaggtggaggttgcagtgagctgagatcatgacactactccagcctgggtgacagagtgagactctgtctc

SEQ ID NO: 452 - DNA, 1181 bp, Homo sapiens
ttctagtagaattactaggtcatagggcgtacacttttcttgtttcttttttaaattagggaacagaacattgtgtaaaaacaagttgtaactcattggaaaatatagaaaagtagaaaaatagcagaaatatggttaaggttcttgatatacatgcaatttgcttttgaatttttttactaatttatacatgtagcagcaatgtggaagagtacataactaagctgggcatggtggctcatgcctgtaatcccagcactttgggaagctgaggcaggtggatcacgaggtcaggagttcgagaccagcctggccaatatggtgaaaccctgtctctactaaaaatacaaaaaaaaaaaaaaaattagctgggtgtggtggtgcgcacctgtagtctcagctgctcaggaggctgaggcagaacagttgcttgaacccaggagatggaggttgcagtgagctgagatcgtgccactgcactccagcctgggcaacagagtgagactctgtctcaaaaacagaaaaaagaatataggatatttccatgtatcatgatggtatcagaaattttttagagagcttcataaagcctttgtaaatgaaactacttcaaagagcttttacctttctatttgaggtattcttttcattgatttcctgctgaggaataccaggggttaattctatgagagtaattcagaataaagattttagtatcacctccttgaattttttcacactgttttgagggatatttctgaaagcatttatgtcacttcactgcagtaaagaatagcatcaaaatcaaatagtaaagaatatattggtgaagtaaattgttataaagacaaattcagtgataaagccaacatctcacatgtgtaaagaatctgctaatccgctggatgcggtggctcacacctgtagtcccagcactttgggaggctgaggcgggcggatcacaaggttaggagattgagaccaccctggctagcacggtgaaaccccgtctctactaaaaatataaaaaattagccagccgtggtggtgcatgcctgtggtcccagctgctggggaggctgaggcgggagaatcacttgagcccgggaggtggaggttgcagtgagccgagatcacaccactgcactccagcctgggcgacagagggagactctgtctag

SEQ ID NO: 453 - DNA, 1052 bp, Homo sapiens
ctcctgtccctaaaggggttaagagagagatcacctagaaatccctctggacacttgtgggttctttagggtttgagtttcttcttccccttgagcttcagagaggagagttggcatggttaaatctgaatggttacctcactgctgaaaacccagaggggcgtggcacactcgcttgtgtggaaaagcctctaaatgcatcccttcctttctttcctgcttcctttgccttacaattgaagcagcccgtggtaccatcacagtatgcagagacttcctcacctttcatatctagggaccacccccgatgcattggtgagggtgggcacttataaatgcctgctattgttaagccattccagcctcttcctctgaatagaccagacgccctttcacttagttcagtgccagtccttttgccttcccaaccctgctgttaggcctgctgttccctttgctcttgattaggagagatggaaggagatgagctcccataactgaattggcctttggttcatgttttctccccatatgtatatatgccatatgtgaatatgccatatatatgtgccaacaaatctatctacgttgttcttttcaaattagcacgcagataggaattttgagtttcttcttcttttagtaactagtataacaagcactggtatttttgtacaaaaaagaaaaacaaaagattgactattgtggtctgcatgacataaacaaacaaatggtgatatcaaagcaacgtataccccagtccagtgtgtgttgccataatttgcaattcagcttaacagtgcacccaatctatatttgcattttgatattatttaagctccatgtacaaggttttgcatgtatttatatggttcttagggaaaaaaaatgctataaactgcaaatctgaaattcaaatgtgttgttccactgagaccagaagaagaagaggagttttaaaagggataatttgttggaaccaataaagctttttgctgatgaacagaaaccaatactgctgtgcactgagaataaaaactcatgcccacttg

SEQ ID NO: 454 - DNA, 1637 bp, Homo sapiens
aaagttttcaaacacagtgaaattttcatgaaactaattgtgaacagggaaaagccaggagaactaaatgtatatgcctgttcacagccctgcttttaatttccaagcactgttttcagaaagccaggtttcagtgtattccgcagaatagacacagagctctgaagtgtcctgggtcaaatgcaacacatcctgtcctgtcttcttaaaggacttttcctgtccaatggcttcccaatgctttctggtgttccaaaatcaatcacacaccacacaggcctaaaccgccatggcccagggctctacctgaccgctggccaacccccaaggcaggttcccagaggcccattgaccaggtgttccattcactcaactcttgaattcatatattaaagtcaactttttagcacctatgggacacagtgatggctttctcgtttcctcattgcccttgagccgtgctctgtcagcactgtattgtgggtagttctatttttgccatacttaatttgttctaaactcttgaaacagaaggcattgatttgttgaaacagaagggattgatttggtatatcatgcaaaccagtaaaaaccaaaatgtttttggttagaatgagctactgaagtaccctgtgtgtgaccaagtgtgaccagaggaggactggactgggtttactgtgagccctacccacatgccaactcacacctcctccagcttcctcattcgtcaagtaggggtgccctagagcaggggctcttgaccagccgggcgtcagttacccttgggagcagggctacaaaacaaacaatggaacaggctcttgggcccgctccagccattgattcaatactctaggggaggaactgagcaatctgtatatcaaaaaacaaaaaccttcccccgggggcttctgatgctcagccaggatttgagcaccaccagatgaggccatctgtaagatgcctcgccagatagccttgggctcatgaaaggctctgagctattgtttccccatctggagaataagactgtgatggggccagtcacatgggccagttctggggattacatgagtgtgtgtggagggcctagtgcagtgcctggcatggaacaggtgctcagcagctggatgctgccagctttcctccactcagaaaagacctactgatgcccacagcatgccagaccccatttctggacctggagaggcagtgggaaggaaggcaagcctcctgtcctcactgaacttccatcctgtgggcaagtcaggcaggaaacaagtaaacaaagaaataatagagcttcaggcagttttaaatattatgaaaactttaaattttgaaatggtaaagagggtccagtgtaatggctcatgcctgtaatcccagtactttgggagtccaaggggggcagatcacctggggtcaggagtttgagaccagcctgaccaacatagtgaaaccctatctctactaaaaatacaaaaattaagcaggcatggtgacacacgcctatagtcccagccactcaggaggctgaagcaggagaatcacttgaacccgggagatgcaggttgcagtgagctgagatcacgccactgcactccagcctgggtgacagagccagactccatccc

SEQ ID NO: 455 - DNA, 1158 bp, Homo sapiens
caaccttttagaactgtgggacagattaaccattaccaggtcttacggatttggtgggagcagggagaggagaagcaggtggttgtggctataagagggtggcacaagttatccttgcataggaactgttcagtcttttgacgggtgttgaatatatgaacctctacaggtgatagaattgtatggaacttaatagacacatatacacaggcaaatgagtgcactaaagctgggaaaatctgaattagataggtgtatgaatgccaatatcatggttatgatatgccatagttttgcaaaatgtttccagtaaactgggggaagtgtacaagaggtctctgtatgttatttcttacgattgcatatgaatttacaattatctcaaaagtttcaatgaaaaaaaaagtagacagcttaggtaaaagtatataggccttttcctagttaaaaagtagtaatgttaaagtatatattcgggaaagacagttgaatatatttttaaggaaaacatcatgttcctgtatatcagtagtaccaaaattgcttagtacatcaaaatcaggaaataattctcagtggtggatctactttctttttttgttcatgtaaaaattgaagtatggtgttttaacactcatttctctattcaaaattaagtagattttaattgatgaataattcatatgtacacataaatggttaaaaaaaggatttataggcaataccattccttgcatataccccttgattgcactgtgcctggattatttgcattagctctaaaattggaataacccgtattgtttttgattggagaactaaggatgtaagaattctttatattctatcctgaattctgaaaattatagtgtaaaaggatgtgcaggctgggcaatggttgctcacgcctgtaatcctagcacttcgggaggtcaaggcagaggattgcctgagcttaggagtttgagaccagcctgggcaacgtggtgagatcctgtctcaaataagtaaataaaaagatgtgcagaattacattttgcataatatatggggagcagtaagatctagaatatgaaactgttgtcactctggaattatcaacatggtactctgactgaattaaatattctcaaatgagcagaacaaaacctggtatcc

SEQ ID NO: 456 - DNA, 2304 bp, Homo sapiens
  misc_feature 552,553,1914: n=a,c,g, or t
attatggaatcacccaatcaataaaattaagacaaatcctaaacatttaagcaggtcatctgcaccttggtaacccatcaatgaattacctacctcctgtggctactgtcatttcttagttgcatgttctttagtgtcatttatctccattattcagtagcctactcattattctctatgtcccttagtccagacccaaagtctggtgattcagattgatgttcttatagtccatctactgtatttcccctgcatttacatttctcaaagacgttatcagtttctctgttcacaaccgttcaagggctcccaatgccttatgataccatgtgagctcttttaagtgagttttcacgaagaagcccctctctaccttttcaaccgtgattgctgctgtgctgcatagtttgatcactcttatgctgtgatccagccataacaaactacttgaagtcaaagcaacaaaatcctcacctaataattagaagtcataatgaaagtcatcaacgtgtttctggatgtggtttcacaaagatctcaaagtgaatactnnattagcccaccttacagtgattttctagcccatttaaaagttataaagtgggtcatcagcactagaagcaagtgtgactggggagggtgggaacttgcagtctaaattattttgatatttacatgaagaatgactgatatatcctttgataaaactcttgcaacttctagcttagtcacaccaagaaatataggggtaaagaactaaatataaccatatagtctatgatatgggttagctatgatatgggttagctgtctcttaacccaaatctcaccttggaattgtaataatccccacatggcaaggggaggggcagggggggataattggatcatgagggggggttctcccatactgttctcatggtagtgaataagtctcacaatatctgatggttttataaatgggagttcccctgcacaagcactcttgcctgccaccatgtaagacatgactttgcttctcctttgctttccaccatgattgtgaagcctccacaaccatgtggaactgtgagtccattaaacctctttcctttatgacttacccagtctcaggtatgtctttattagcagcataacagcagactaatgcaacaggctaagaagggagttacagtattggccagggtgattgacctggactatgaagacgaaatcagtctactactccacaatggaggtaaggaagagtaggcatggaacacaggagaacccttagggtgtctcttagtattgccatgccctgtgattaatgtcaatgggaaactacaacggcacaatcctggcaggactacaaatggcccagatacttcaggaatgaaggtttgggtcactccagcaggtacaaagccacaacctgctgaggtgcttgctgaaggcaaagagaataaggaatgggggtagtggaataaggtagtcatcaatagcagcttcagccatgtgaccagttgcagaaatgaggactgtaattgtcatgagtatttcctctttattttgttgagaacatgtttgcacatatatatacttgtactaagaaaatatattcattttatttcctttatttttcctttatcatgtgatgtaagatttgttgacttcatatcagcatttaagtgttaactttaggtaatagcatttggattggggattggtgcactcccagttgtacaaaggatagctgtattgtgttaggtgtaattatgaccttattattggcttcagttgaagattatgtgtgatttcaggagatgtggatgggttcaagttgacaaagttgtgatggttaatattgagtgccaacttgattggattgaaggatgcaaagtattgttcctggatgtgtttgtgagggtgttnccaaaggagattaacatttgagtcagtggactgggagaggcagacccaccctcagcctgggtgggccctgtctaatcagctgccagtgtgaaaggaggcatggagagaacagacctgctgagtcttctggcctccatctttctcccatgctggaggcttcctcgccctggaataacagactccaagttcttcacacttttggactcttggacttatatcagtgatttgccatgggctctggcgttcggccacagactgaaggctacaatattggcttccctccttttgaggtgttgggacttggactggcttcctggcttgcagacctattgtgggacttcaccttgtaattttgtaagtcaatactctttaataaactccccttcatat

SEQ ID NO: 457 - DNA, 643 bp, Homo sapiens
gactccgtctccaaaacaaaaaaacaatatacaatagggctaatatgtttttaaacttaatatgaatggtatcatactgtacaattggttttgtagtttgcttttgtcactcaatattatgttgatgagatttattgggctgctatttaaagcagttttcttagcacagaggccctgtttgcttgccaaactgcatgtctgctgggttgcgtctgtctttaaagggtgacttcctctaattaatccactggggtgaggggtaagttgaacctgttttttctgttcacaagtgtggatacaagctaaaggtggccctgtgtggttccctcactacaaccatggtatagtagtccattgtagaaatataccacagttctattgatggacctgttgggttattctatatgttttgctgttaaaagtcatacttcactgaacattcttggacttgcatctttgtgcacacctggaatattacataaaagtggagttgccagggtgcatataccaaattgcttaacaggctgggtgtagtggctcacacctgtagtcccagcattttgggaggctggggcaggcagatcatttgaggtcaggagttggagaccagcctggccaatatggtgaaaccccgtctctactt

SEQ ID NO: 458 - DNA, 2205 bp, Homo sapiens
  misc_feature 1922: n=a,c,g, or t
ttttgtaaaaaaaaaatgggtagtgtatattttgcaggtttaagacaactcaggacaataaaaacaatggactttacatgtgtatatatatagctctcttaggcaccataatcagtatgagccaacaatatttaaacttgattcaggccacattcagacatttgctcttatatacaaatatttaaattaaatacaatctgaaatgtgttctgttacatacaaaaaaggaaaaactatacaacgcagagcagtgtgtgtgttttaaataattacatttacatgtaagctaaatggaaccagcaatggtgctcaagtttttatcatcccttccagaaaatctttttctaccatctcttctattttttgcctggctttgctggaacatggtttgtggttctccagtttcatgtccttattagggaaggcatttgagtagaggataggactccctgagtgtcctccacatcggcttgtgactttgctgttgaagacttgactgagcacattgaagaacggcaggagctgctccatactgcgcacggtgcagatggtgagcagcaagtgccctggctcccaacccaatgttctccctgagttgtcttcctctggatttttctttgctcttttccgaagaagttttgctagtcgtaccacgtaaggtttaaattctcgttgatgtataccctgccttctgacttccaaacctgaatcatctgaggcttctggaataaaggcccatcggtacatctgaaactgaggaaggttttcagagggcaatgcgagagccaaatccaaaaatttgcaagcagagagatagaggtttaaccaccgctggctgttatatgaagtagagaagccattacctcctgtgtacgttgtctccagaccagccacagagggccctgaagtccgtgaaatatcttcatcagcagtgagttcctgctccatcagtaaaaatacttgtacaagttctgtaatcatggtaggccagagtgaggtaagatgttggggagacattcttaaaagtaacactctgaaaaacaggaacacttgagaatggagagttggcacctgtggcaaacggagactctcaaccaatctctcttgtatatctggaagatatttctggtactggtcaatttcactgctaaaaatagcaaatgctaatcttttaagaagcatagctctctgttctagctccacatcacggtttgcaaagagattaagtgaactgctttgagccactgctacacgagtcatcaaatctctaaatgttgttttatcatgtgtcatcagattgtccataattgctctccaatgattaacacaagaggcatccatctgaaagaaactgggatccataaagaggtcaaaagcttcttttttccaagctctccgtgtgtactgatacccactaagactgctgagcagctggacacaagctcgataactaggggcattatgtgcactgtgatttctgaggtagggcacaacataatgcataatatttacaagtaaaggaataacccgctccttttcatcactatagaaaaccatatccaaaagatgagccaaaacctcagagagtaatgtcaatgcatggacactatatacagaaggagttatgtttgcggtttccattgcaggtgataacatatcttcaacatcagattccaaattggttccatctaccattattttgggagaaggcttaacttcaagatttcgtcgcagccatgttgtctgttccagagaagaaccagcaattgcaccaattgcatccactattttgtgagttacatcctgaaggtctctttggtcttttttattttccaaactagggtttttcataataaactcattcagaaccccaagtataagaaactgccctggagctggaagactcagttgtatagagtctntcagaagtatcaacagtgacgcccagctatccactaaattgggcactggaattctttgaatataagcatagaaaaactgaagcatgcagacttccaaagaaagatgtttcttgtccttggctatggctggtggctgctttaaaacttcttttacagtctggataacagtttctgctctcatgacactgattgaacgaaccaattccactaataaaagctgttcttcactggctgcaggaatgaccttggtcctggtggttgttttattctgtcttcttagaaa

SEQ ID NO: 459 - DNA, 1251 bp, Homo sapiens
gtttcccctggcctggagggcagttctgcacagagccagtggcggggcagttgcagtggctactgcatctcattcattgttgtcagcaagaattcagcgattaagagagatggcagttggttctaaatttaagttctaagcgtttgtccgctttaggaattgtggaatcaaagcagtctgcctcttcactctttaattttataataatgtgatttaaactgccaacaaactatctgaatgctgcattttgttggtttgacaatttacatcattatatacagtctcatcataccactattattttgcagttttgtgtgcgacaactgcttgaagaaaactggcagacctcgaaaagaaaacaaattcagtgctaagagtaagtttcgggaagctttctgtttcctggactgcacattttagaaacttgtagaaattgtcccccattgttctttggttcctctcaacacatggttctgaggttcggttgtcaaagattttcgttagttttttccccagtactttgtatttttcttgtctcatccttaaggagagccaggccagtcatgagggtaagaatgcaagaatgttcttcaggggcttcactgagaataggcagcacagctgtgagtccctgaagtctgtgcttctcagaatggtcatctcagccacggggctgctgagcacagagctcagagcaggactcgcagccttgggctgtggatcttcatcaagtgtaaaacatctcagtccacccttaaagggaatatttggcctgattgttatatgaaagtcagcatttatgatcagcgcatgttttagatgaaaggttagatgtgcagtaaactttgtaaattctgagaaaatttatcaacagattattctcaagtggtttagacctaagacccctcacccctcgtgcgtgcatgtgtggtgtaatgttggccagcactctctaaccctgggccctatgtgggctgccgtgggtctgtcccgtgggtgctggcttctgctacagtggggtatgagccatggcctctgggaaccagccaccaccccaggagcggtaggagcctggcctgcatgtggacttggctggacatgttactgcagctggtggtgcctgtgcagaaatagaaggaacaacctgttactgctagaagtaactttgcatgagtagactttcttttttttttaatttgagacattctcgctctgcactccagcctgggcagcagagcaagactccatctc

SEQ ID NO: 460 - DNA, 2243 bp, Homo sapiens
gacatgttttgtggtctaacacataacgtatcatgggaaatatttcatattcactcaaggagaacgtatgttctgctgctgttgggtggaatgttttgtatgtgtcagttaggtccatttggcctaaagtatcgttcaagtccgatgtttccgtattcatttgttgtctggatgaactgtctattgttgtaaatgaggcattactgtaaataggctattattatattgctgtctgtctctcgattcagatctattaatagttgctgtatgtattcaggtagtcttatctcgatgcatattatttaaaattgttataacctcttgatggattgacccctttataattttttttatgcccagctaatttttatttatttatttatttatttattttttagtatttattgatcattcttgggtgtttctcggagagggggatgtggcagggtcataggataatagtggagagaaggtcaccagataaacacgtgaacaaaggtctctggttttcctaggcagaggtccctgcggccttccacagtgtccctgggtacttgagattagggagtggtgatgactcttaacgagcatgctgccttcaagcatctgtttaacaaagcacatcttgcaccacccttaatccatttaaccctgagttgacacagcacatgtttcagagagcacggggttgggggtaaggttatagattaacagcatcccaaggcagaagaatttttcttagtacagaacaaaaatggagtctcctatgtctacttctttctacacagacacagtaacaatctgatctctctttcttttccccacatttcccccttttcttttcgacaaagccgccatcgtcatcatggcccgttctcgatggtcgctgtctcttcggagctgttgggtacacctcccagatggggcggctgggcagaggcgcttctcacttcccagacggggcggccgggcagaggcgctcctcacatcccagatgatgggtggctgggcagaggcgctcctcacttcccagatgatgggtgggcgggcagaggtgctcctcagttcccagacggggctgccagtcagaggcgctccttgcctcccagacagggtggcggccgggcagaggtgctcctcacatcccagacggggcggccgggcagaggcgctcctcacttcccagacggggtggccaggcagaggcgctcctcacttcccatttggggcggctgggcagagacgctcctcagttcctagatggggtggcggccgggcagaggtgctcctcacttcccagacagggcggccaggcagaggcgctgctcacttcccatttggggcagccggcagaggcgctcctcacttcccattcgggcagccaggcagaggcactcctcacttcctcccagacggggtggccgggcagaggcgctactcacttcccagacggggcggccgggcagaggcgctcctcacatcccagacgatgggcggccaggcagagacgctcctcacttcctagatggggtgatggccgggcagaggcgctcttcacttccagacggggcagccgggcagaggggctcctcacatcccagacgatgggcagccaggcagagacgctgctcacttactagacggggtggcaggcgggcagaagctgtaatcttagcactttgggagcccagggcaggtggctgggaggtggaggttgtagcgagccgagatcacgccactgcactccagcctgggcaacattgagcattgagtgagtgagactccgtctgcaatcccagcacctcgggaggccgagggggcggatcactcagggccgggagctggagaccagcccggtcaacgcggcgaggccccgtctccaccaaaaatacagaaatcggtcagtagtggcggtgtgtgcctggaatcccaggcgctcggcgggccaaggcaggagaatcacgggagcccggggcagggaggttgcagcaagccgagatcatggcagtacagtccaggcttggcaagagagggagaccgtagaaagaaaggggagagggagagggagaggcgacccctttataattatataacgacctttgtctcatgaggcagcttattactttcattctctcttctttttttggtatagccactcatgccttcttttggttttgatttgcatggagtatctttttccatccctgcactccagcctgggcgacagagcgagactccgcccc

SEQ ID NO: 461 - DNA, 2159 bp, Homo sapiens
attccattgcccctcccatccatgctgggaccctcctggcccaccaaggcccaggcaccactgtgaatattctcctctgaaccactagagggcaggccaggcaggccaggcgggcccgtgcagcttgtgggcaagaaggagctggcaaggaccggcgctgctggagactgacccagccctctggctgaggacatgcagcagctcctaaatgtagagatgcctgtggctgagggggcctctctacctgtgtccccactcactccaggagcactggctttggtcacgtcttagcagcggggccttgctccgttgttcccttgccctggtggtgggggggccagaccgcctccggaatcctgccacctgtgactgtctgactgcttagtgcttcagctgtcccttccttgtgtcctgggggacctgctggcggcctcttcctgggagccatgacctcagaccccacccacactccagatcgagacccctgcctccccccggcaaatgtcctcccgctgccttgcagcctgcactttgcacatgctcacccccagcacagtcccactggcccctcacctccccttccctgagctccttcccaaggactcctggtcactgcctgctgtgcagtcagaggcccagggtccagcagcccggcgggaacgggtgctgcctcttcctccagttagctccagctcaggtctgagacccgtgctgagaaaggtctgagcaccgaccgtgccctctgcccagggctgggtcctgagcagctggttttcctgcaggaaggttggagcaagcaaagtccttctctgccctcagggtcagctgccaagactggggcggatgccagagaggcaggtgggctgtggctggactggtccggagctggcttccttaccagaaaagcctcagccttcctctggaagcatcccccgttctgggcaagggggaagggctcctttaaggggtgtgctttcccagtggggagcagtctggccctgccccctactaaagcctctgctctcagcactttcccccaagtccttgtaacttgcttgaaggtgggttctggctgccagccagtccctggacaaactctcctgccccttttaaatttcactcattttgtataaacccagcaggctggtgtttacttagccctgtagcttttttcattttttctttccgtctttcttcttgagttcacggttcaatattgcctcctcgccctggtgaggggaggtgctgcttttctgccccacctgccggctggttccagcagcgctggggcccagctggggggccgggatgggggcttctctctctgggaggggtgcaggtgccctcccaggctgggagggttcttcctagcttcccatctgccccgctggtgagagttgggcttcttggtcttggaactccctggcattgggaacagagcatttccagcatttgttgttgttgttttactcacctaacccttagaaaatgaatgttagaaggtgcctgccgaggcgggacagagtgtttgctcgcgctggagaaggctctgctcagccctgagagtcccttcctgccccaccgatactggcactttaaaaaggaagctgaccgcacagtgtccagacgaattggcccccagaagatggggagttctgtcctgcccttctgtgtctgcgtgacctcacccagcctaggagggaggtgcattcagggtagatttgcctctcattcaaagttctggggctttgggcggaaaacagccagctttggcgctgttggggagactcctccagaccaggaaccccagaaggagacagagcctgccacatcctcccacgccaggccctgggccagggtgattggactgagaatttggccacaaccaaattgatgctggctggaaccagaggccagaaagcctggccttgtccccatgtgggagccctgtcctcagccctcttgtccccttgagctcagtgaattcccaccaggtgcccacagctcctggacttcaaattctatatattgagagagttggagagtatatcagagatatttttggaaaggagttggtctatgcaatgtcagtttggaatcttcttgaaagtttaatgtttttattaggagatttaaagaaaataaaggtctacaatatc

SEQ ID NO: 462 - DNA, 2207 bp, Homo sapiens
ttttttccagcagtcactgcgcctgcagtcggcgacagtttaatgtgaggcaattaccgctacagacatcttgcttcatcttaaaaaaataaaaattttcaaagcatctcacaggccaaagagctaagcaggaccctcactcagacattcaagagtgtttccgaggaaaactcgaggaggaggcagcgtggaacatcttcccatggccacggccccggcacagagctcagatgcctgcgggaagcggcccctccacctgcggaagggaagacgatgcctgttggagccgcacggaagcatccagaactctgaggcctgggggccggctgcggtcagtgcaaggctgctgacatggtgtgacctcttgcaacggggtgggggcagagcgtgcggtgacaagggtcagactggcggctcccactgcagccagaagtgagggagccagcacacgggggtgggcagtggacaggacaggatgcggcaggccccagtaccccccactcaggaatttgcttcaggccaaaagcccagggcagcagggtaaggcgccatcggccaggacctgcacggcaggggcagccccctccactccctggacccgagaccgtctctctcctggaagatggacatcaaaactgcatccggaggtgcagtctgcacccagaaggaaggggatctccgccagcagagcccaagagtggcgtgcagactgcatgtgcacagcctcagcccggccccctcagccattgcccatgagggcctccacgttgtctgatggtcgctggcatctgccacgtccccaaggactcgaggagaaccagaggctgacaagagcagcatgagctagccctggcgatgctcagccgggctggacacagcggatccacaaggcgttcaggcctcgcagccactccaaaggcccaggaaacaccgactgtcagaaaacccggagcacggtgaccctgcgtccgcacagccgcctttccgtgtgtaccaggcagagaaagccccagccctcccccgtgccagacccctgggtagcagaggccaccccagtccaagcagggtgtctggccagggtgtcacggggtcgagggctccgctcacaggccttacagggtctcctgcggtcaccccagcttcaaggttcgcggctgctggcccgtgtgtccacctggagcaggttcctgcaggccgcccaatgtgtaccttgggctcagacggtgtttcataagaggaaatggggaaaacacttgctttttatgtcatcctaaaaacatccaaaaccctcggggccagatcaaccctggctgtccccgctgagcacaaacagcgtcccagccccacccccactgcccaccctgagacaccccacagaggctgatggagaccccaatgcccatgccccatctctgccacacctgcaggggccacggcacccaccctccccgcggggaggtcagggcccaccagtgcccgcggctggcggtcccacatcctcgtcctccccactgtcagagggccttggtgccagtggggtgcacggcgtggggcgccggcttctgggggtggcgggcgaaggcgtaggcctgccccaggatggccaggtccaccagcacctgcagcaggccgcacacggagaactgcagaggggcacccttcagcaggaagtaggccgtcttgaaggcgtcaccactggtccacatgagcaccatcttgatgctcatgccctccgtggactggtggcggtggttgcggtaaagctgggcacacccagcatggcttcggtcagcacagccaggaagcccagggtctccacaaacagggcggagtcaatggacaggtaggtgatgtagcccgccacgcccgtgaaggccaggacgcactgcacgtagtccgagaagctgctccactgccagaagtggtgggggtcgaagtctgtaaaggagcggcgcctggcgttgagctcgttggccacacggacctcggtgcacagcttcagcatcagcagcatggtcaggatcatgatggcgctctgccacagcagcggggactcaaagcgccttccaaaccagaagagtatccgcaaaatgttggccaccagcagcaccaggcacacgtaggtggagaagccgtcggcgttctgcgtcctgcgaatgtcccgatactgcgggacgtagggcaccacccctccgaagaccatggcc

SEQ ID NO: 463 - DNA, 1603 bp, Homo sapiens
tttttttcaaagaagatggtaaaaccctaacgggaaaaatgaagtgaataatgaatgagatataacttcttccatccaactaaaaactatagtgaagacattatttcttaaattaatatatgcatttattataatagtaactagtgcctatattagttaagatataattttgcctttaattaaccattccttaaacaaggcagaagcttattcctctatcatagaccagtccagaagtagagtggcagctctctgccctatgggattgtcccaggggccccagctccttctcttgttgttccaccatccttgagtaatgtcctctctgtgtggtccagagtggcagatcatggtccatatttcagtcaggaagcagaggggatacaggagaagccagagtatgccaagggaagcaccttgagaattgcacaggatgcttctgctcatatcccattggctaaaacttagtcttgagtcctagctccaagggagactgggaaatgtagtcttcattctgggaggtactatgccccactaaaaatccagagctgtattaagttgagttaggggaaagcgaatatgggggagacggaccaatccctactacagtactattggaatattatttagaacttgaaaattgctaataaaattatttcaaaagaataaataggcaggcacacaacatattttttaagaaaagtgtttttaaattgccatattctctctttttctttttttttttttgatgtaacacttctgcttttaatgtaactttctttttaaacttttttattatataaattttaaccatacacagaagtggggagaattgtgtagtgagccctagacccatctcccaggtttagtaagttatcagcttaaagttagttttatctattctccctggccctccacttatccccttcctgagttcttgaagcagatctcatttttgctatttgatctgtagatatttctgtatgtagctctaaaaggtaaaaggtcctttttaaaaaaaataaactttaaagtttaggataattgtattcacatgcggttgtaaaacataatctggagagattttgtgtatgctttactcattttcccccatgatagcatcctgcaaaactatagtaccatatcacagctggaatctgacatggatacagtcaagatgtagaacatctccatcctcacaagagtccttcgtgttgcccttttatagccatatctacctatctacctccccttccacaacccctgacactcactagtctgttctccctttctataattttgtcattttaagaatgttaaaaatcagccgggtgcagtggctcatgcatgtaatcccagcactttgggaggccgaggcaggtgaatcacgaggtcaggagttcgacaccagcctgactaacagggtgaaaccctgtctctactaaaaatacaaaaattagcctggcatggtgcatgcgcctgtaatcccagccactcaggaggctaaggcaggacagtcactcgaacccaggaggcagaggttgcagtgagctgagatcacgccactgcactccagcctgggcaacagagcaagctccgtctc

SEQ ID NO: 464 - DNA, 231 bp, Homo sapiens
ggagaagattaacaaagtcctttcttgaaactaaatacataatacacactatgagatgaagacgatatagaagtccgcatagtcatcataatcccgttccttggccggttgaggcagctcagtggctgagcccagtcaagccagcccgcagcttcactcacgacttcaagatttgatgctaattcttttgggatttctaccgttatgaaataagtgtctgagccttagaaa

SEQ ID NO: 465 - DNA, 1177 bp, Homo sapiens
atgatttactagaaataatggcttcttgctcaatttcactatgtgcatagtgcctcttttgaggtctgtgtgtatattctatttatggaagttaaaaagtatttcagaaatgcatatattaatctgtgtggaatttctcttatcctttttcctctctaattcttgcttggatatttgtctcaagagatggtccaacatttaaaatagcgaataatatcttagcccatccaaaaacaatccttcctaaaggtttatgaacttaataacagagcctcaaaatacatgaggactcatagaactccaaggagaaacagacacatccttaacaatattgtagacttcaacactcttctcacagtaatcaagagaacaactagaaagaaagtgcagttttccctgtttttgtagacatgaaaactatttcacacacttctgaaagtctcattcagtaagttactcatttctccaccttatgactgtactgtgctttcaaagtgctgcacaaagaataaaaagttttaaagtggctttactgtaatttcagataaatatttgaacttttgagtctgaattatccaggtgaaatgcattggatttctgatcctctgtaacttggaagattaccgtcttccaggtatattggttgtccttaactgccttaatggcatgagttgtgaatcttctctgtctcggaagaaacctaacagtggaaattgtttatggcaagggtcacaaatttacatgcgcagaaggtcaggaccctctgtaaggtaaaggcatgaagtgcccccttctttattaacacataactgcatttgctgataatatttatttgcctagaattcaggccctttttgcttttacagacagtgctgtcttaaatatgctagagatgtatctttagtcacttaagctggtgtttctgtagggtaggttcctaggagtgggattggattgttgggttacagtgtgtgctatttaaaagactgaaccagattatactctcagcatctgtttgtttttaaaccttccctagtctgtgcttatgtgttttgtttgcttgtttgttttttgtttgtttgtttgttttttgagatggagtctccctctgtcacccaggcgagatcacgccactgcaccccagcctgggaagcggagcaagactccatctcaaaag

SEQ ID NO: 466 - DNA, 2093 bp, Homo sapiens
  misc_feature 1401,1868: n=a,c,g, or t
catgaaatacttacattaatcctaaccttgctgtaatttcatggctaatgtgtaatcgaatgttttctactactgggcagctgtttggctgttaatctttgttttttttgtttgtttgtttgttttgtttgttttaatgtccataaaacacccttcttgctttcatggagcagagcttcaaatctaaatttgggtttctttgcccatttttaaataatgcttacaaaagaatggctttgaataatgttaagtgactttaccttcagtggtgatcgaaagaaaattagtaatattcaatccattcttagtaccttgtgtaatgaacacgcatgcttgtttcacctataattacgactaaacaggaagttaataccttgtcagtgatgcagtgagatactgtgcagtgcctactgttaatccttaagataaaaaaggatttctcagaagaaatttcaaattaaaatgtgttttaaagggactatttggagttttgtgaaattgttcatatctttttgccaagcatccttctcttgaaataaccatgtttctgaagtttgttgttccctgccttgatattcgcatctacatattttatacagacatttcataacattaaagttaataaaactttatagtaaaccagatctttatatgaacagttacagtagttactgtctgcctgatggacagctaattgcactgcacttcgacctctattgttggttcgcacctttgtatttttctaggttggttgtaaagtcttcttgaggatgattcttaaaatttcttaaggcacttactccctttgtttcccacctcattttatcatctcttccagtccccaaagcagtgttttgtgttgctcagtataggtttttgaggcaagggctgtttttataatgctgattcacagtcatacaaatcttgtcttttgagtcatgtaaatcttgtctttagttctgaaagaaatagactctcaaatagaatacaagaaattaacctttagtaatggcataagcttttagttttccggaaagtgctgagaggaaatgtatctatactactgcgttctgtcctctgtatgacctttgtgtgatgacgtgcaaaatagatggtagagattgggataacaaatgatttgtggaacatcgtggtgataattttactgtcttaaaggtagaatccatgaacttggccttgccactatataggcttttgaattttgacaagccttggggggatgaaacctagaataagttatttatggcgttacgctttaatagggttgacacttaaaaccttgttttcataaatgctaccttttggttatgttgatctgatgaacagatactggctgtcattgaaagaaagttaaccgaatgttcagatacttattgggcncctggaacatggctgctctgtagcttcatgaatattcataatattcataaatatttgtgaataaatatttttagtatttccaatttataagctctttgaaaggagggaattttttttttttttttttgaggcggagtcttggtcagctgcccaggctagagtgcagtggcgcaactgcggcttactgcaaccaccgtctcctgggttcaagcaattctcctgtctcagcctctcgagtagctgggattacaggcacccgccatcatgcccggctaatttttatattttagtagagatgggatttcacgatgttggccaggctggtcttgaattcctgacctcaggtgatccgcctgccttggcttcccaaagtgctaggattacaagcgtgagccaccacgcccagcaagggaggggacattcttatgtttctcctagcatctttcaggtctttaatgttttcaatnccttggcctactgttctttgtagcctgtggttggtcaccactgctagtaccacttatcattgaatgaggaagatagagaatagagaagcagaaagcatagtttaacatctccaacaatcaactgttaaatcccatatcccatagtgactacagtaaaggtcttcctcaagataaaccatttgcaggctttgtattaaaaatctcatgtaaggaatgtttcagaat

SEQ ID NO: 467 - DNA, 1569 bp, Homo sapiens
gttaaagtggtgtcctgccccagattgccaccatgttgttaaagtccaatatcctgatgctaaacctgttcgctgcaaatgtgggcgccaattttgctttaactgtggagaaaattggcatgatcctgttaaatgtaagtggttaaagaaatggattaaaaagtgtgatgatgacagtgaaacctccaattggattgcagccaacacaaaggaatgtcccaaatgccatgtcacaattgagaaggatggtggttgtaatcacatggtctgtcgtaaccagaattgtaaagcagagttttgctgggtgtgtcttggcccatgggaaccacatggatctgcctggtacaactgtaaccgctataatgaggatgatgcaaaggcagcaagagatgcacaggagcgatctagggcagccctgcagaggtacctgttctactgtaatcgctatatgaaccacatgcagagcctgcgctttgagcacaaactatatgctcaggtgaaacagaaaatggaggagatgcagcagcacaacatgtcctggattgaggtgcagttcctgaagaaggcagttgatgtcctctgccagtgtcgtgccacactcatgtacacttatgtcttcgctttctacctcaaaaagaataaccagtccattatctttgagaataaccaagcagatctagggaatgccacagaggtgctctcgggctaccttgaacgagatatttcccaagattctctgcaggatataaagcagaaagtacaagacaagtacagatactgtgagagtcgacgaagggttttgttacagcatgtgcatgaaggctatgaaaaagatctgtgggagtacattgaggactgagaatggccctgcataaaatgaactctgaaaactttaccatctagagtgctcatgcaattaaaacaaaacaaacacaaacaaggaggcactaagcctattctgacaccactggtctgtagtaccagaattgttttgttaatggaaagtttaagtaaattatattgtaataaaaaggtagataaaccattgtacaacagtattctaggccgccaacaaaagtgtgacagacacactaaaagccctccaactttaacttgtaacgtagcttcattctcaaagctgactccttttttttctttttccttttcctgagtgtagtacagttaaaatttcaaacagctccttgacactgcttttcatgttcaaaccagccattttgttgtactttggtaaaggacctcttccccttcctcccctacacatacagatacacccacacacagactgactctctttctctcataccccaaggtcatgagtgaatgatgcttagttccttgtaaagaaaatcttgggatggggaaaggggtaggcagcaagaggattcaacaaacgaaaaacataaaaactttgtatatgacttttaaaacaagaggacaacacagtatttttcaaaattgtatatagcgcatatgcatggacaaagcaagcgtggcacgtgtttgcataatgtttaattacaaaaaaatatttattctttaaaaatcttc

SEQ ID NO: 468 - DNA, 1047 bp, Homo sapiens
gtgagagagagttagttcaagccaaaatggccgacagagtctctgctggtttctgaatatttaaaatacaaaaaaacagatagacaaaaagaattcattttttggaccttttttcatttccatttctaccttgtatgcctcaatttgctggatttaagcactgctgcactttattgaggttggtaaatattttcaatttttttaaaccaattgatttatatggatcttgtctaaccgttttcactggtggtgttgcaaatcgacatttgtctagcatggagactggcttcagacatttcgtggatctgtgtaaatcagacccgtgatgtactttggttcggcattttagaaatggaaaagacgtggtaaaatatttagattttgaagtgatttaattgcacttttaatgtatatgcagattttcatcatcgtttctatcttgcaataaatgaagctgcgagtaattggaaatttgctatttagaaagaggtttttaaaaaacacagacctccccctccccccttaaatctgctgcaaaaatttgcataaatataaatgggtttgcattctttcggctgctaaggccgacaaaggatctgggagggcaagccctagaacgggaaagcctttttctatctttttattttttaaactgggccctccttcctagagagatgtaaaacctaaagtaagacctaatacattttaaacatcaggttgggggcgggtgaacaccaggaggtttggggtttgtagattcccctgcttgaaaacctcccaagcaatatgtggctcacccctctcctttctgcgcgcgctcatttgcactgggtctctgtgtgtgttctcaaatgtgcagccagatgcgcttttattttgatcctggattcaaccaaagggtaggactatgttgtaaacatggtgttttaaagatatgaacagctattcaccgcgattagaaattatttctttatcagttctccctgtgtattagccttcttccatctcctcacgaaataaaatttttgtttaattttacacagatgc

SEQ ID NO: 469 - DNA, 1413 bp, Homo sapiens
  misc_feature 1378: n=a,c,g, or t
attgtgagcaattccatcctccatcagcagcattggatgcaggcgatcagtcctctctcgatgcttccttaaagacccttggcttctaggagtttcttctctcttagtcctcctactgcagtgcctgcttctgctccaactccttggctggcttcctcatctcctcacctgtaaatattggagagccctcagctgaaaaccatggaccccttctctcctttgtctaaactcacccccatagtagtctccaaactcctggctttatgtactatccatatgctgacaactcctgcacttacatcccccacccagtcctctctcccattttccagactccgtactcagcatctcctatggatgtcaaataggcatctcaaacatgggtcctcccacagtcttgtcatctccaagcaggataactctttcttccagatgttcattctaatgccttggagtcacccttagcgcctcactttttccatccagtccatcagtgaatctgtcagcttcgccgcttccacagatccaaatccctggcattctctcttgcttgtattattgcaattgcctccaaactggtctccctgttttggcttttgctttcttgtagtctcttctcatcagaatagttggagatcctttcaaagtgtaaggcagatggaatcactccactgctcaaaatgccccaacgttctctgtgttacaaagttaaatctaaagccttcctgtctctagggtgttcccttgctacctctctgaatctgtttcctagcatgtactcttgcccattcagctgaagccacatggtctattctttgttccttgaatacactacacacgccattgcctggggcctttgtgcttgctcttccaggaaggctcttcacacagctatccacagagctctccctccctgactcattcattacctttatctaatctttccatgcaaaataggaatcccttcccacccttccctgcctttttttccaaaacgcttactataactgtcctctcccctagaatataaactgcatgaggtcaaaaatctttgtattttttttttctctgctatatccccaaggctagaaaaatgtctgacacatagtagatgttaaaagaatgaatgactcggccaggcgcggtgctcacgcctgtaatcccagcactttgggaggccgaggtgggcagatcacaaggtcaggagatggagaccatcccggctcacacggtgaaaccccgtctctaccaaaaatacaaaaaattagccaggcgtggtggcgtgtgcctgtagtcccagctactctggaggctgagtcaggagaatcgcttgaacccggtggtggaggtttgcagtgagccaagatcgcggcactgnactccagtctgggcaacagagcgagactgtgtctc

SEQ ID NO: 470 - DNA, 955 bp, Homo sapiens
ggcaaagaggatacttgtagtttgatattatcaatacaaagatatgtagataaaagatgtcctaaaatctcgagctaatatctatgaagggttttttggctcctttaatgccttgtgggttttttagcttaagaagtaagaacaatcatgcttacttttggggcagttagactcttttaattacaacttttgagaagtaacactgggaaaatgtctttcatggtttgagaagtcctagtccatgtgttcaattttcatgcctcttcttttgaaagtcttactggggtttttttccctggtttttacctgtgcattctacctgcagacacatgtcaggaaagagttgcacagggtttgagttagggtggtacatatggtataaaccaggttgggccctgtggaatccctagggccaaggcaaacaggaatcccggtactggagtatggctgtcaaaagtgtatatacaccagtttcatgtctttgctgtctttaattcagaggcagcccaggtccccctgcctatttctatcctgacttttcagtactgtaaaatttggatttaaaaagcacttgccagtttggaaggctgaggtaggaggatcacttgagtccaggagtttgagaccatcctgggcaaaatagcaagaccgcacctttaaaaaaaaaaaagcagccaggtgcggcggctcatgcctgtggtcccagcactttgggaggccgaggcgggcagatcacaaggtcagaagattgagaccatcctttctaacatggtgaaaccctgtcactacaaaaaatccaaaaaaaattccccggacatggtgccaggcacctgtagtcccagctactcgggaggctgaggcaggagaatggcatgaacccaggatacggagcttccagtgacccgagatagcgccactgcactctagcctggacaacagagcgagactctgtctc

SEQ ID NO: 471 - DNA, 2018 bp, Homo sapiens
  misc_feature 1952-1957: n=a,c,g, or t
aacgtcttcaagcatggagccatgaagctggatttggctttctgtcgctctctctacagggtacaggtgaaagggggcagacccctcatcatgctttccaggcatctgccacttcccaggaattgtctccctggataaacaaggcgaagtccctggctgtgcagaagcagtagctgtgtggtggcacagtcaggaaaactcgggggccctgttggtattttctacccctgacccgtgtgcatacttctgtcgtagctctcaccacagtagactctgctatcattgtgtcttccatcctctgaaccctgtgcaaggtctgctcatggtgaatgcccagtaaggctcacctattgctgctatctcatcatcatatcatttctatgtgcccccctagctaagagtctggactgtggttacattctcaggaatgtctgcaaagtcatatttaggtgtgaggagagtaaaacagagctagacataatgttgcacacagcctttggcactggatgcctggtgaatgtcttgtgcaaatgggtaacgtgaggagcagcatttggggtgcgcaggacttaactatttgtgtataacatattactgatgcctgtgtgtcatactctgctactccaagtctagtagtcaattgcataccatatctcagtctggcactgagggaagcagtctggatggaggtacagctggagatttggttgaggggacttatctctgacaacagcctcttgttgatcttcccagacagtgacaataccctcccctcccttgggctggacccctctctacagctaggagccaatggcagaagacaaaaccaaaccgagtgagttggaccaagggaagtatgatgctgatgacaacgtgaagatcatctgcctgggagacagcgcagtgggcaaatccaaactcatggagagatttctcatggatggctttcagccacagcagctgtccacgtacgccctgaccctgtacaagcacacagccacggtagatggcaagaccatccttgtggacttttgggacacggcaggccaggagcggttccagagcatgcatgcctcctactaccacaaggcccatgcctgcatcatgcagacataaacgtgacccaaaaaagcttcaattttgccaagaagttctccctgcccctgtatttcgtctcggctgctgatggtaccaatgttgtgaagctcttcaatgatgcaattcgattagctgtgtcttacaaacagaactcccaggacttcatggatgagatttttcaggagctcgagaacttcagcttggagcaggaagaggaggacgtgccagaccaggaacagagcagcagcatcgagaccccatcagaggaggtggcctctccccacagctgaggggctggggctaggggtgggtggagcccttttaaaatacccttcccttcaacaactctccagctctgaatggagaaactctctaggccatcccctcttctacctcctgcaacccacccatcctattagcctcccacattcaaggcccgtgatacagggatgaggtcagcaccagcaaactctggactggtggaagaattccccaccagatctccttgaagcagaattagggatcagcatcattaacaccttccccaccccctccccccaggcagacagtgaagagaatcagaaaacatgattatgtgtcactttaatacaggaaatttaggtgttttttggtgtttttgtttttgttttctttccaaagctcacctcggggacaattccttgggcttctcctgaggtaatgattacccccccacccacagctgagtctgtgaggccccatcctttccctacgttttctcccatcttttttcctcttcaatctcccagtcatctggtttgtttgtttctttgttcgtcctgaggcaggagagtcgcttgaacctgggaggaggnnnnnncagtgagctgagatcgcaccattgcactccagcctgggtaacaagagcgaaactccatctc

SEQ ID NO: 472 - DNA, 1119 bp, Homo sapiens; identical to SEQ ID NO: 369

SEQ ID NO: 473 - DNA, 2501 bp, Homo sapiens
ataatactaaagggctcagaaaacagaaaaaactaaattccagagtcatggttttctggtggtttgtctcaatatttgaatagaaatcctaaattatctggaggagtagaagtcctgtaatcttttatattgggcttcttaaatatttctgtcaacagatcttatatcagggtgatctgcatatcattcagagttacgtactccacgggaaggttgtatgtaaaatcctccagctctgtaagccttgttatatcctcaatggagaaggggtcattccttttctaagatcactcttacacttttttattagacacacacacacccttccccaaccaaacttgtctaagtcctctgtctttcatactcttgtttagtctttaacttctccttattaaccagcttctttcccataatgtatagctttagtcggatctcaagcctcgtttccaacctatttcacccttccttgcctatcaagctctggttattctttcttccacacacatgccctgagtaactattctgtgcactgtcgccacccctttacatttccttttactccccagatactactaaatggcttccaccaccgttgcctgacttaagcacgtctcagaaaggtcccttttgaccccctcactctctttttggacctccatactgctgaatctctgacttgaaggtcctttcctggcttctgtgaattcctggcttttttcctttttagggtctgtgtctttcttccatctgtaaaacagctttacttcccagcatccatcatgatcattgctgttttctaacttgtccttcaccccatgactgagttaatttgcgctgaagacactttactcccaattatctacagtgtttccctaaatctgtgtctccaggttggatgtttctcatgtcgttaaccactggtcatccttccacaccttttctgtatttgcactcactgagcctatatgcatgtatcatgtggccatgaccttggccgtggggatgcacccataaccatcataagagaacacaaattattactgtgtatcagacattgtttcgaatgttttacatgcgtcagctcttttaacctttatgacaactccataatgttatttcccccctttaactgattagaaaactgaggtacagaaagattaaggaatttgtcaaagatttcacaattatgaaatttgggtttggggactggaagccactgcactggcttcagaatccatgtccttaaccactttattgcttctcataaggtgggtctttgtttcctggtcatcacttgtttttactaaaatgggtcaaactgtgctcatttatttataatctactattcttatttgacagtacatcttggccattccttcaagcaaatgagataaaccagactcactctttaatgcctgcataagctattgtgactgtagaaaagacggagaatgtctgggtttgaggatatgtgggaggggtggggagaaggagtagagaagggctaaggcatgcatgttgttttaggtgtgtttgagatgcctgaagaacatcagtgtatccccctaatttctgtcatgttactcaaaccagacacattgtggccatttctttttcctttatcattcccacgtccggccactgccccattcctttttgttcccgtagtagaccctcaatatatatgtgtgtgttggtaaatggccatacacagcagggtattttttattattattttcagttccctcagcgcgtttaccacaaagctgtgcatataggtggcaccatatatggcgtaccttgacctcgaagagaatctacatggacttttatggacctacgtacacaattttagaaatcataataaatgaatgctggagtcctcaagaccccttccagatttgatttgctaggaagactcacaggactcagcattttgtcatactcaatggctatgatttaccacaccgaaagaatccagagcaaactcagcaaaaggctcaaacccaagtccagaggaaaccaggcacaatctttgagaatcttaatgaaatcacacaggatgtgcttcattgaagctccatctgggacttaaaacaacacacgtgagatgtgttccaggaagtcgtcttgagcacccattgctcagagtttatattggacttgctttctagcacataccacaattgtagacctccagaagaacaggaggtgttcagcgtaagacaatttaggcacacggagctacttctcattactgggaacaatgggaaacttcccaaaacctaaagtacagactccagcccaaggatgaaccttgcaaggatcaaagaatagcagtctctggcctgctctgttctctttttcacagttacttaaatgggaaaatgctgagttagcttaagtttctgtaacaaacattaagcaaataaaattttctataacggaaataagccctagctttgagatggaggctttttttcgtgtaaaccattgttacc

SEQ ID NO: 474 - DNA, 2480 bp, Homo sapiens
agccaattaaattttttagtttttgaaatttttatttatatgtatacttagatgagtattttaagctgtcgacctttagtttgccatacgggtaggactgtatttcatgttaacaactggtggtaatgataagccttcttctagcgaattttctcttctttcctgtcactttcctaagtttttttttttaaagactggaattttttttggctttatcttgtcttaccgtagagatttgttcaaaactctaagccctaccacctcccctttaataagctctttaaatagttgaatcattaacaacctggtgggaggcaagtcatttaattgaaccactaggaagtgtattttcttttctttttccgccaaccttctggcggcatttggaaaagccgagacaaaaggctctgagatgttattttcagttattccataggcaagcctttttacagagcatatgtctccagtcggcagcctgagacatttccgagcatccggttctagctaccagtgcctcccaatgcttagtgcacagtactgtagactggccatcacccctctccttggaaaatgccactgtgctgtttgaaaaaaagcagccttttagggctagagtattttatataaacagaagagctaagttcctgaagactaagctagatagctgcagctatatgtaaattgtatatttttatgaacttttgaagcacacactcctgtttccctctgtgtagctttgtggggatttcatgtatatatgctgtctgaaagaatccagaggttggagtgccaatagaaaatgaaaacaaatgccttgtactacaggcagcctctgaaggtgaccacataactgtcttcactgtgaccaatcggagtccctgcttgcttgtgaagaaggggcttttgtaccttgttggagatgccacctcagaagttcacactgtgcaggaaaaaggttttattctctcctggcatacattagaatgtcagatgcttgcatccatgtggaccacgatgggcctctaaaaattggtgggcagggggtttgcttatgagttttctctggaaaccgattttactcctggatgtattgaatgccccttgagctttatgagatacgagtccacatggataaaatgttagagagtggagttctacagaggattccaggaagaggccatgtctgtgcagtcctagttccagacaggtgagaagctccaggaactactggctaccttgacaagctgggtaaataagttatcattctgggtaactggttgaaactctgacttttggacaagtaattcctggggttctgtctttggtagcatcaccagggatatttgggtgggacagacagaagacacacagctgcctgttctctcctgcccatcatgtttggcccactagatgaagctgtactcagcaatttagggaatgtaacccttctcagaactggccattttcaggggaagcttgggagagcaatagtatggtgagccccttagagatgagcgcctactccttcttggcgaatgctgccttcagatgcttaccaagtggtcactgcatctagtaagattatatttccagtacacttccttagggcagaaacaccatcctatcaggtttggtcagtcccttcttcatgaagggagtcatggggaattcctgaaaattttcttccttctgcagacagttggatgagtcccttagagaaggcatccagagacataactaaactgaatatcatcccatattgattttaggaattgactctaaaactctgtgcagaatcttgtgttgggattgtatcttgacattcctgttgtgttatttttcttaactggagtgtgtgctgcctttcaggtacaatttttgtgtaataaaagccagtgcattaagtttatatagactactttctatgcaagactgagatatggaatagataggaagagatatgtactgctgggtacatggacagtaagtgtgttttcagatggagtaccagcaccgaaaatgggttgagggaggatgggttgtatgtatgtttctgcccactaattttgagcagccatattatgaattaaatcgtcacagccaagtaataacccaagaatggtatgagtttcatgtgtaatagctcaaatggaataagcatgaatgctggagtggaccattatcctcaaatattctatgtcacttctcatttaaagactcttgttatgaactattagaaactttaggcaaaatcaaaagtatttgcggcaaaataaaggcctattctactcttatttaaagtgaaacactgtatacttgtttctctccaaagcgaaattaagtatttataatttcaattgcctcgataagtttccaagtcactgaaatctgctgaaggttttactgtattgttgcacaactttaagataatttttgtctcaatgtcaacttttttcactgaataaaaatttaactgggcc

SEQ ID NO: 475 - DNA, 1459 bp, Homo sapiens
  misc_feature 1425: n=a,c,g, or t
ccagaaattggtcggctggggaaatgcaaaagttagcatttcagtagtgaatttctcctggaacaaatgagcaatttttcctctttctcttaagtagtatacccttttctcacttagtaatttaatggtatataaagacatgtgtataagtgagtgcatacatatgaggtatgactatagggttgtttgtgggaatttcttttcctaacatacagaagatcaaagtgttcatctcaccccgccctccttaaaaggtgtcttttgggagactatgtgctcattgactatagtgctgccaagtaaaaatatcttgggaactcttctactagaatggccttcagggcttggcatgttcctttggtttacccttagagatgagaaatcctcctcctttgaggatggatttaagttctggaaataatctcaagtgcttgatagcacagttggatgaaaaaagatggcaattaaggtaagttacaccatttttgtttctaaaaaaatccctaagaaatttcttggaatgagtctttggcctcagagcctctcaaagtgtccacttcaagggggggatcatcctcattagcacacagatttttaaaaatcaattctcttgccatgcctcctatgtgttcacatctctgcatacactacagatataagtgcataatcattcatataaacatctggtaggtattctgtaaaactgtgtttactttagtgcatgttattgtcatgttatgatgtgactggggtgtttctttgtcatgaaactttgcttcttcacagaattagaatactgctctctctatattgaactacatatacagcgttttcttgtatcagcccccaaagtctggatgcccggtgttgtgtttacatgtgattgtgcctaggagtctgttcacatagagacacctgtaagtatttattacaaaacggaatgtaagcaaatatatccacattggttttatttgaatcaaggtgtttttttgttttttgttttttttccttttgaggaggaacagggagcctcctcctccatgagcacttacagaattgtgtaaaattctgtgaaacagtggtaagcatgggcacccgatttcagctgtcctgctgccgctgccctccaacctgctctgtgtgtgtgtgtcgctgtgcttggtggcagtgtgccgtgctcgtgccggctcttcccagcagagtggtatctggctgtaacgtttgacgtcttcatattgccagtctgtattgaggggtgatgtacatggccatacagccaaatgggtctgtgtaccagtgtggggattccaagaacactgcctgtcccccacagcaaatattgatgctgttggtcagccaaagattttcctctcctttgctgcttaaacttgtgccttaatattgtacataataaatggataaaanggcaaaaaaaaaaaaaaaaaaaaaaaaaaaaaac

SEQ ID NO: 476 - DNA, 1329 bp, Homo sapiens
atcctgtctgaaaacatttagatgaggcaagtgttctctccaacttcatcccaacccagagccttccaacctgacccacctgatggaggttcgtctgtggctggtgcccagctgccatactgcaatcgtccttcaccttcacccttccctttgcctctcttctgcgttggatctctgcttctcattcttattctcagactcctcttgttggatttctcccttgttttgtggaaaactcatccagtagcctgctaagaaggggtgaatgaaaggtatagtttttgaaacagctaacatctgaaaggatttgtagtaccttgagatgtgattggatattttggctggtatacagttctgggttggaattaatttctcagaattttgaaggctgtcattcctccattatttctaacttcttttgttacttggggaagcccaaagccattctgattcctgatgtggccagtgttctctctctggcaccttattgcataatttctctgtctgcagtgttttgatatttcctgggttttatgagttgatgtccatttttatccattttcctgggcattaggtaggtccttcataggcactaggagcctggaaatatgtgtcctccaaagaagtgttggtcaattattttgatgatttcttgccctttatgtctctattccctatttataaaatacctattattgggtgtattagtattaattttcttattttttctgttctgtcgtccagctttttgtctttttgctctactttctgggagagttcgttgagtttatcttacagtgtttcatacttgaattttcaagagcttgttattgttctctgaatgttcctttttatagcatactgtttttgtttcatgattaaaatatcttctcttacctttctgagaatataaatatttttgtcttttttgcccaacatagtctgtttcctgcattttattttcctttctgttttgaactctattactcagatttttcaggaatgagctatttcttcatatttaagaattgaagacaaaaagactgattggggtcaggtgcggtgctcacgcctatcatcccagcactctgggaggcctaagcaggcaaattgcttcagcccagcagtttgagaccagcctgagcaacatggaaaaacccgatctctacaaaaaatacaaaaattagccacgcgtggtggcatgtacctgtagccccagctaccagggggctgaggtgtgaggatcacctgagcccagaaagtcttggctgcattgagctaagattgcaccactgcattcgagcctgggtgagactgagatcctgtctc

SEQ ID NO: 477 - DNA, 1722 bp, Homo sapiens
cggcaaagaggcctaagtgcacagacattttctttccttaagcttcaactctctagttgtattatactagtcttcccatttccgggtttttgtttttctatttacattactgtatgaagaggaggaagctgatcttgggatatcgtaagtcttggaattaaaagacaggaaaatgctgtagaagtaaaactgtttaaacttgaaagtatttacatatatatttataattaattttggtcccttgctgattttatgggtttggtaagtacttaggaattaagtctactcttagtttagtcttaagatttttatagtaaatattttaaatacatctgaaatattaagataattattcaaatatactaatagagttgctgttctttcaccatttgcttagtggccaacagtattctgattggaattgattattatcattggactgaataatacaatttttgtatattctaagagacaactaacattaataaataaatacactgtgtctacatatcgtactctgagcaaaaagatagatattttgctcattttttcctgagtggcatagaggaactgagatcgtgccactgcactccaggaaaaaaaaacactacttgaaggtacccttgattatattggattgccataggtcatttcaggtgtcataagagcaatataattttgttcattgcccattcccaagaacctagagcagtatctagaacatagtatatgtcaataaatatgttaaatgaatgaatttgatttgatttgttttaaaatagaatagttgtactctgagggaggagggaaatgcttaaacaatactaagaattccattctttagagacaaattacttagaagttgatagtgacatattgaaagggttgttgattgttggattattcaggtggtgaagatgatggtaggggccatggcggctgagggagaatgagtcttaaacactgaggaggcacaaaagattgggtggctggatataataggaaactggacgaaagaaggagaagagaatggcgtactgataaaaaatatgaatgaaagaagatgtgtggaaaagaaagtttcactttgaaggcttgatttttgaagtgatggcagatatagatatacatccaatagatgagtgggaaaagtaaatcaaacaaatgaaaaattgagtccaagattgatgggagactaataatggggaggactgagcctgggggcaactacattagtaacagtggcaggttttgttttttcatgttcatttaaaggaaggaggagagatttatgtgttagaaaaagggaaattgtggtttaatcaataataatttaggtgggtatcctagccactgaattacaggctttgaggtaatatagaaatacctcagttcttgctatggagtcaaatagatgatctaattgtggaagctatacatttagcagctgttctagaacaatgtctgtcaaaatataaaccagtagttaatgtaagtagtgcattctttaggaggttaagaagggaagacattagtgtagaacaagttttatagctggagaagtcttttgagataaagtctagtcaaattgttatttacaggtgaggaaaccgcccttaggaggttggatttgcccgatatcttaaaactatctaaaaaaattgggaaggcttcaaggaagcattggttcttgaaggtctaatatgatttttattgggtggg

SEQ ID NO: 478 - DNA, 2494 bp, Homo sapiens
gggctttctcattaagagtatttttctgaaattgtcagttataggaagaaagttattcttccagcaggtttataatatcttgattattaaatttaaattgttttagtggaaggaggcaaaaccggaagaccttatggattcaaaacttagatgtgtgtttgaattgccagcagagaatgataaaccagtaagtatatttatagttaacaataattgaatgttgtaagctgatacttatttgcataccatttcctgcaaaaccaagatttaagttggcaaattattttcctttatctgatgtctgaagaaaaaaaataagctgaagtcagcaaataagtgggcctttatgaaatcagcctttgaaaaactcacggaaagacaactgattgacagtgtttccccttgaaaagtgcagcccgatggccattgagatgtcataaatcctgaagagcttctgtggcctggcaaaggtataggttgctgttaaacagtgggtgagagtgaaagagggaacaatttgccctttatcatggtggttgatggacgtgtgggaagctttcaagttctcttgttttacaaagtgccctgtcagcctccctaccccttttaccctatctacctcttcaatcaaaggctgcttttagatgaggatttctcagcctcaacactgttgatatttggggcaaatccttggtggtggtggaggttgccctgtgtactgtagggtgttttattaatagcagcatccctggcttctgccctcttgatactggtagtacttcccagttgtgacaactaaaaatgtctccagatattgccacatgtgtcctggagggcaatatcaacccccattgagagtgatcccattccggtgttgcctgtggggagaaggaaggagccccatcctctaggctgtccactgtgagcgctttacctttcatgatcctcacttgtgaccagttgaagaaaggagactgtatctgaaatgctaatttggacttcccttcaacctagtcgaaaacattttaatttttataaaaacaccaaaactgtgaaagcatgcagcatgtgaaactatcctagccattaatagctggagttgggaaacagaagtaccctgaaatgttgtgttaacagtatctatgttggtctgcgcgagtgctgttgatttgtgtcaaaagtacctgagattttatttctgctgaatcatttaccactatcattaccctgtttctttaagtggatagtggtcattttttccctcttcccagtgtacatcctgtcacaggaaggtcagtttggaagctgtgaaagcagtattctggcctcagctctgtgataggttgacttggtagcctggggccttgcttcacagggcctactcttctcatctggaaaatgatgggtagagctagattccaggccaatgatcgtcagttactctttccctgacaagctgcgtgcttccatgccctccctccactgactggctctcatcccctgtaaatctcaagaggggatcatagctgaatcttggcaggggaaataaggggagtatgtaacttcccaagattgaaacattgcagacactgagtttgtttcaccttcatcccagcttccaaatgctaagttggtaaagtaattcgccctctgtctaatgctctcccaagcctcctaaccccactaaggcaatcctagggatgttcacatctttgtggtgacagtaatttgtggctaataattcctgagcttgcacaattacagtatgctgatttttccgtggcaggaatttgatagtgcaatatacacagccctttttctctttctttgaagtattagtctcagccgaacttcattatttgcccttatccataatttctagggccctgttgctttagattattaagatatcagataaagtaatccatttttaaaataaatgtgacattttacagtgtggatgaaatgctaccacgtttggtgtttgctgagaactactttactttgcataaaaaagtccattattacatggtcggtgacacttaggctttcatttgtttttgaacagcatgatgtagaaataaataaaattatatccacaactgcatcaaagacagaaacaccaatagtgtctaagtctctgagttcttctttggatgacaccgaagttaagaaggttatggaagaatgtaagaggctgcaaggtgaagttcagaggctacgggaggagaacaagcagttcaaggtaatagtttattttctggtaatctacagaaaacaagggcgttttcactagcttcttgggtggggaagttgatgagccagtgaatatatagatttctttttgcttttggtatttggctatttttttctcccccagggagaaatttccatggctttcatgagagtctcaaaagggtccttggatctgcctaaattaagaaccactgtcccttgatcagaaatttctcaactgttgaagctcttgtccccc

SEQ ID NO: 479 - DNA, 1217 bp, Homo sapiens
atccagtttattttgcatttatggaactaaatgagatgatgttgagagttataaaaagaaagcaaaaaataagtttgactatttgaattgtaaaatagaataatatataattttattctattgatttttaaaacaaaatttattaagaattctataatcctatgcaagttttgagatttaaaaatctacaactagaagatgtgctttgttattcttttctgatactgatgtatttataactgccttcttccttctttgaaaagaaaactatcccaataataaaatattaacttatttatttttattctttttatttttactttttgtgggtacatagtatgtatacatttatagggtacatgatatattttgatatgggcatgcaatgtgacctagtcgcatcagggagaattgggtatccatcctctcaagcatttgtcctttgtattacaaacaatccaattacactcttttagttatttttaaatgtacgattaagttattattgactatagtcaccctgcttgctttcaaatagtaggtcttattcattctttctatttttttgtacccattaactattctccccaattttatgtgtagatttatatataataattgttctatttaccagcaatgaaatggtaactttttttcttatcaggaaagtaataattattctgtcttccattttataataacattaattgcttttattaaaggcttacttttacaatatgccgagactgtactgacaacctaccttatgaagttgggctattattattccattttaacaagtaagtggactgaggtttaatggcccacggtcacagagttaagtggtgaagaggccttgaggtctaactcaggagccaggattcttgatcgatgtgttattcttcctctcttctggcaaatagcatataatataaacatatgcattcgatcagagttgtacacaaaattgacttttagtttaaaagctaatttgtaagtttttaaatgtgaataaaaatgcgtgctttatctttcgtgtgtgtcttatgtcgtcggaatctccctttcaggaaagtttctgtggaacatctatcattgtaccagaactggaaggagctctttatttgaaagaagatggaaagaaatcctggaaaaggcgctattttcttttacgggcttctggaatttattatgtacccaaaggaaagactaaggcc

SEQ ID NO: 480 - DNA, 2159 bp, Homo sapiens
tttttttttttcagcacaaagcattttaggtttatttaaataaaaattataatttatacaatactttttctttaaacaaacaaagttttcttaaaaaaatgttacaggagaatttttttcatcggttcttaatacagtacaatccttttgttgaacaaaagtcacactggcaatgattatttacagatccaaaatagactcaggcttcagacataaaaaatttaacattcgtctagttcagtgattagtcacagaaattaaacatctgcccagatgtacacaatttggtaaaaactacagcttctctccacggggagcccagagcccgtgccgatccgcgctccgctcccgaggacttccagggaggggcctgtgctggcagcagagccagtcggtggccctcccccgaccccccgctccccgaatgtggccctccctgggggcttcggccacacctggcacgtggtcagttttcatctccctttctccacaaaagggactcgaactaaaccacccgacgctggtaaagccccatctgccccagggacccctcccgctgtgtttggggactgaatcccagcacctaggaagaggcgctcattggccccgaggccccggacccatccttgggcactgccgggccctggggagagaggtgtggccattgtctgcgggcactgcctctgcagccgcccctgggggtgggtcagtgcccaccctgtgttgcctcaggcgccaaggtggggttcactgggatatgtccccctcccctggtgcaccaagagagccagtcccctacaggagccagacccacggctcagagcgggttctgtccccattcgggaaaggccgccgtgtggtcatcctgacgccaacgtccgcgcagtccagagccacgggggctccgctccaccgcctgggataggacatgtgcttaatctggtgatcggcgcagctccccccaaagcacccccggcaccagcgtgtgactctgcggcccctcgtgaagggggtgaaaccagcccatgccgccggatccctcacccacaccagcaaatgaggatcggagcaaagataaaaattacatctgaaaaaggatacaaaaataagaaaaccagcttgctcgctgtaaaaaatagaatcttctgtttcttcaaaaaacaacaatctcaacgacacccaagggactcaggacaagctgagggagctgcgggatccgccccagcagacacgcaggcccgcggggtggccacctccttccaggaggcccaagccgcctttccctcccttcagcccagcgcaggcggccccagcagaccaggcctgcgggcgctccctccacaaatgccaccttgttcccgggaagcccaggcttccctggggcagggcgggggctgggggggtctgtgcccggaccggcaccggctaggcacgcgggggagggaacgctgtcgcatgtcggctgcaggcagtgcaggcccaggctctgggctcggctcacggttgctccctaaagcacaggggctgccagagcctctcggatggcccaaaggcggctgcagcctgggccaccatggtcccggaacactcctccccacttcctcccccaaccaacccaggcaaccgcagcctgggggccatgtgccagacatgccacagtgctcggagcacctccaacagccttcgcggatgttctcctgggccttccaaagagcaaagtgtgagaaagatgtgcttttacctgcaccatcctgtgcccttactggtccccagctacagacctcctggccagcgtgtcaggccgagagcagcaggcaggcccttacagacacggtgctgagcgccctggaggccagcaaggaaggtgccaccaaagacactgagggcaggtgaggggtgggcccttctcaccctctctgttcccgtggagcgagtgtggagcgcaggcagggtcactgcgcccggccccagcccggcaccaagggcaaatgccacaggagggtctcatgtaagaggaaggaggccgccaggcccgtttctcggtggttggtgaaaggcccccatgtccctccttgacgacatctttctgtccccaggaggaagggccccgcactcttcagctatggctttggtggtggacgagcttctggcccttagaa

SEQ ID NO: 481 - DNA, 2208 bp, Homo sapiens
  misc_feature 1581,1778,1779,1781-1788,1791,2174: n=a,c,g, or t
tttttttaagaaaattatcttccatattgcatggaattgtgaactaatgctatatatttcagttactctaactttttatttttttaaagtaaaagtattcatctaaagaaatttagttctaatgtagttgggattgcgaacaactttttctttttcatctgcagcactgcctcctaaaccaccaaaacctactactgtagccaacaacggtatgaataacaatatgtccttacaagatgctgaatggtactggggagatatctcgaggtaaggctacagaaacttcattttcagagagttttagattaaaagaaagaaaagcaccagcttgctaagttccatttttaggatatcatccaacataagcatgaagcatagttggttctcttccaaagacgaccagaaaaagtcactgagcactggagaactgtgggtgctggatgccacaggaaattaaatacccgggaagtttcattattgacagagatgtcagtgaagtgccagagtgaagtggcactgcctaagaacagagtgtgaaggcactctatctattaagcacaactctaagaattcttgccttaaacacaataagaaaacaatgccattttatgttagctttgggaagggggagtaaggttggagaaactcttttgagatcatgagtttctgtgctcatttgtcagagagattgtaatgtttggttgaaaaaataaaaacttagtaccacagatacaccaatagtgaaagtgatatgcacctgtttgtgatgagactgcaattgctaacatttctatttaaacaaattattagctcttattagtgagctctgaaaatgcaattcattaatttaaatctatgtgggcaggaggaatatgggcactcactgtactttccacttgattttgctgtgaacctaaaactgctctaaaaaatagcctattttaaaaaatataaatctgtggtcactaaaccttaagatgagcattgttttgtgttttcatttcagggaagaagtgaatgaaaaacttcgagatacagcagacgggacctttttggtacgagatgcgtctactaaaatgcatggtgattatactcttacactaaggtaagccagggaatatagctgaaattagggttttgggctgatattaaaacatatttccttattccaaaatgttaatacctttatttttatattgtttttacaggaaagggggaaataacaaattaatcaaaatatttcatcgagatgggaaatatggcttctctgacccattaaccttcagttctgtggttgaattaataaaccactaccggaatgaatctctagctcagtataatcccaaattggatgtgaaattactttatccagtatccaaataccaacaggtaataaaaactgaatgaattatccagttacgatgtttagacaagatccttttaatacttagaaaacatttgaagcagatgaattacatgtaatcaagtctaaaaaacttgacactcgtaattacataattgcaattttaaagatgtttccatgtcagctattttgttaaacaattgttatttgattaaatnccttatccattgaatttattttaatctttctaggatcaagttgtcaaagaagataatattgaagctgtagggaaaaaattacatgaatataacactcagtttcaagaaaaaagtcgagaatatgatagattatatgaagaatatacccccacatcccaggaaatccaaatgaaaaggacagctattgaagcatttanngnnnnnnnnggnatatttgaagaacagtgccagacccaagagcggtacagcaaagaatacatagaaaagtttaaacgtgaaggcaatgagaaagaaatacaaaggttggtgtttcccttgttcttgtgctagagataaccaaaatcctctaaaaccatttaaagatgatctcgctttctgtgctttgaatgatcacgtggacacaggaaggggaatatcactctggggactgtggtggggtgggggagggagggggggatagcattgggggatatacctaatgctagatgacgagttagtggtgcggcgcaccagcatggcacatgtatacatatgtaactaacctgcacaatgtgcacatgtaccctaaaacttaaagtataataaaaataaanaaataaaataaaataaaatatgttgagccactcc

SEQ ID NO: 482 - DNA, 1627 bp, Homo sapiens
ccatgtccttggtaagcctgcacacctggcttcctaatccctgagagcctgcccactgtccagatccagtgagttggtacaaaacgtacagactgaagtccctgggcttgcttttcccatgggtgaggaccagaaccagactctgagcatccttacccctggccacccgaattgttccaagtttgaggtaccccgttcccagagatctgggggtccttctttggagggcttgctttgttctgatggccttcagaaaggaatcacatgaagtataaaaggacaggccccttggtcaccaagttttggctcctcatacagataggactcatccaggttcccagcgaggcactgactaagcgaggctcagagcttccatatcaaattcctcagctttgttctgtgcccagagggggtgggccccattctgggccctgtgaactttgtcttatatatcaccatctgtatcagaattcctcctcaattgcagttaagtgaaaatacgtggaagtctgcttttccatcctgtattctcccacatcactactggctgtgcggcccccgctgcttgccaagcttgggaatccagagaggggcagtagtagagtgggccagttgggacccacccgcagagctgaagaaacacgccagactaactgatgggattccacaccggagcctctgagcgcacaggcaggcatgccaagggggctgcagggtttgtcctttacttatctgcccctttcctagaaaactcctcgtttctgaaattaggcattatatggttccaggacccagccttcaaaattcctggcaggccagcttcaacattccatggccagccctgcctaagccagacttgggtcccagtccctcagtctctccagtggatatcttctgtggtgcatgctgttgagtccaacccaaaggccaaccgaggcacacaggagttgggactggctgccacaaagctagaaagggacaaaacagcacttgcttccctatggccacatggatagtccctggatatccttgctgtggtagaggtcctctacccattccagccactgatagcagggggattttccttcctaaggagaacagatgtaacagctttgcaaagtaccggcccataggaatcaaatgggtgagatcagctttgggcctgaccccagcaagaccagcatctccagaccccagcctttctcctcaggcctaagagagtcagggaaagagaggagactgtcccagagaccttctcctcgggtcagccagatagtctggatctatggtgtgactcaagctcctccttacccagggggggtaaggccaggcctctagctacttggagttgtctgtaataatcttgaaaggcccaagggcctgtccccatcctgacttaaaggcatctgcttccctgtttcatatcacatgacagagaaacctgttctcatggcatgtaacatccctgtgaagagagcgttgtatatgattttgtattttttaattcattttaatctacaggttggaatctaatttttaaattttattggaactcacattttaaaaagaaataaaatttaaaataataataataataataataataataataaacctttgaccagtg

SEQ ID NO: 483 - DNA, 1340 bp, Homo sapiens
  misc_feature 1168,1169,1198,1217: n=a,c,g, or t
gatagaaaagttttttaaaaagctgagtgtaattgacatgaattagtgataaatgaccaaaaaaaatacaccactaatctaaaatactttatgacctatcaaacaggagacacaagtttgtcaaaaagtttgagacacttagatgcacttagatgccttagaaggcatctccattcctggtctggaacattcacaagtgtggtattggccctaatcagttctacgaacaactttttaataaggctggttgggtaaagactaacttctggctttgttttcccaatagaatatgctagaactgtgcaactttagacatttttaaggaataagtgtattattactcatagtagtgaagggaaaattcacactgttctcaaggctaatagacgtactgttaattttagctcatgtgtttaaatggattgtctatcaggggaaaaaagtcaaatatgaaattgttctaatgataatttgctgtaattctaaagccaatatgtgaaagagctgtgtaataatatatttaaatactaaaaaatcttttggacattaaccttagatgctgatgtcctcttattgagttgtggttgtgtttggctaatactggttgaaagccctttaatttttcagtgacatcataaagattttttatcctactgaaatcatccatagaatgttttaaaccagttttctaaatatcatgtattttttaaaacctaccactggatacccagactctgaaactgggcttctcccaatcttggcaacattagcaatgatactcactttcagtattgatggcaaccctataggaggcgtgaccattccaattttgattttatttttaaagtgtgaactttccagaaccctgagcaaaatgagtgcagcgattttctttttgtaggacaagaagacagaagagttcttctctgtggtgactacagactagaggaatgctctagtgagtttccacttcaagtagtacccactcataagccgggggggcagacccttctgtctaaacacatcttttatttgtgttccagcgggtgctacaggttcaggtgtttgctggcgtcctgtgttctgtggatctggttggcgggggccctttcctggcccggcctggtccactggggactcagaggcccacgtccggggggcgggcccnncgggcccggcgggagagcctccttcggcngtttctgactgatttaccntttttaaaggaatgtgatatttatattatagacatacagagatatacaaatatattatatatttttctgagatttttgatatctctatctgcagccattcttcaggtcgttgcatttggagcg

SEQ ID NO: 484 - DNA, 2154 bp, Homo sapiens
gtgtggtttctgcgggtgatgctggcgcccgtaccatgagcgaggcggacgggctgcgacagcgccggcccctgcggccgcaggtcgtcacagacgatgatggccaggccccggaggctaaggacggcagctcctttagcggcagagttttccgagtgaccttcttgatgctggctgtttctctcaccgttcccctgcttggagccatgatgctgctggaatctcctatagatccacagcctctcagcttcaaagaacccccgctcttgcttggtgttctgcatccaaatacgaagctgcgacaggcagaaaggctgtttgaaaatcaacttgttggaccggagtccatagcacatattggggatgtgatgtttactgggacagcagatggccgggtcgtaaaacttgaaaatggtgaaatagagaccattgcccggtttggttcgggcccttgcaaaacccgagatgatgagcctgtgtgtgggagacccctgggtatccgtgcagggcccaatgggactctctttgtggccgatgcatacaagggactatttgaagtaaatccctggaaacgtgaagtgaaactgctgctgtcctccgagacacccattgaggggaagaacatgtcctttgtgaatgatcttacagtcactcaggatgggaggaagatttatttcaccgattctagcagcaaatggcaaagacgagactacctgcttctggtgatggagggcacagatgacgggcgcctgctggagtatgatactgtgaccagggaagtaaaagttttattggaccagctgcggttcccgaatggagtccagctgtctcctgcagaagactttgtcctggtggcagaaacaaccatggccaggatacgaagagtctacgtttctggcctgatgaagggcggggctgatctgtttgtggagaacatgcctggatttccagacaacatccggcccagcagctctggggggtactgggtgggcatgtcgaccatccgccctaaccctgggttttccatgctggatttcttatctgagagaccctggattaaaaggatgatttttaagctctttagtcaagagacggtgatgaagtttgtgccgcggtacagcctcgtcctagaactcagcgacagcggtgccttccggagaagcctgcatgatcccgatgggctggtggccacctacatcagcgaggtgcacgaacacgatgggcacctgtacctgggctctttcaggtcccccttcctctgcagactcagcctccaggctgtttagccctcccagatagctgcccctgccacgcaggccaggagtcttcacactcaggcaccaggcctggtccaggaggagctgtggacacagtcgtggttcaagtgtccacatgcacctgttagtccgtgagaggtggtgggaatggctgcttcattcctcgaggatgcccgggccccacctgggcttgtctttctgtttagagggaagtgtaacatatctgccatgaggaacataaattcatgtaaagccattttctcttaaacaaaacaaaactttctaagtacagtcattctctaggatttgggaagctccttgcacttggaacagggctcaggtgggtggagcagtaaggcactacccagagagcttgctgctgcggccctgtcctgcggcctcaaagttcttctttactatatataacgtgcggtcatacctttcttcgttgtggtggggatggaagagcagagggagcatggcccaggggtgttgaggccagcggtgagagccgtgttagccaagacatggaactgtgttctcaagggttatgtggggcgtgggctctccatagtgtgtatgaaaagcttgttgactctagcggctcagagaggactttgctgggtttctttctgtgaatatctccgtgctgaccatgctggaattggatgattctgcaattcgggacctactgcaggggtccgtttagtaacgtcttgtctgtgatctttgttcttgacctctagaccccaagatgtgaacagtgcacgtgttaatgtcatctttgctcatgtgttataagccccaagttgctgtatattttcacaagtatgtctacacactggtcatgattttgataataaataacgataaatcg

SEQ ID NO: 485 - DNA, 537 bp, Homo sapiens
gtcaggaagatggcggcctctggggcggagccgcaggtcctggtacaatacttggtgttacgaaaggatctatcacaagctccgttctcctggccggcgggcgcactggtagcgcaggcttgtcacgcggccaccgcggccttgcacactcaccgcgaccacccgcacacagccgcttacctccaagagctggggcgcatgcgcaaagtggtcctcgaggccccagatgagaccaccctaaaggagctggccgagaccctgcaacagaagaacattgaccacatgctgtggcttgagcaaccagagaatatcgccacttgtattgctctccggccctaccccaaggaagaagtgggccagtatttgaagaagttccgattgttcaagtaactgctgctttgatgtgtttgaatacgcaggccacccattccaaagcatcatgtgttccttgcagtgtcagcttgctcccgtctttcagttgtgacaatttcttgagggttaagcacatgttcatattaaagttgtcattaataactt

SEQ ID NO: 486 - DNA, 390 bp, Homo sapiens
ctccaagtcccagcgaacccgcgtgcaacctgtcccgactctagccgcctcttcagctcgccatggatcccaactgctcctgcgccgccggtgactcctgcacctgcgccggctcctgcaaatgcaaagagtgcaaattcacctcctgcaagaaaagctgctgctcctgctgccctgtgggctgtgccaagtgtgcccagggctgcatctgcaaaggggcgtcggacaagtgcagctgctgcgcctgatgctgggacagccccactcccagatgtaaagaacgcgacttccacaaacctggattttttatgtacaaccctgaccgtgaccgtttgctatattcctttttctatgaaataatgtgaatgataataaaacagctttgacttg

SEQ ID NO: 487 - DNA, 1146 bp, Homo sapiens
cgttttttttttttttttttttttttttttttagaagaatctcactctgtcgcccgggctggagtgcaatggaacgatcccggctcactgcaaactccgcctcccggattcaagcaaccctccctgcctcagcctcgcgagcagctgggattacaggtgcccgccaccatgcccagacaatttttgcatttttagcagagacagggcttcaccatgttggccaggctggtctcgaactcccgacctcagatatccatccgcctcggcctcccaaagtgctgggactacgggcatgagccaccgcacccagatggcctagtcattttttttaacccaattttgaggccctggttagaggctggttagttcttcttgagtagcagatctataccccaaccacttcccggattagctctcacactggaccattatgtatctaccctaactgccccagggccagctatcctacaaagtgagaaaacccgtatacaggagccacagaaagtactcaaattagctaatccatagggagcccaagaaacctagctaaccctcccttcctcattatgcttttataaactgttccctactgttgaagcttgctgttcacctgtcctctggtacaactccctgtgtagccctacatgggggctttcattcacagctataaatgacaaacagagtgcacttcatctaaagatgaataatgaagagttgggcatttcacttaagatgaacaaagatttgtgcttttcatcattgcgttgttttcggctagcaaaaaaaatccttaaagctcataaaacacacggtggggcagattaatggattaacaccataaggtcatttagggacccaagttccttccatctcttgttccctaggagttttcttaggcaggggagaaaagagttatttttatgtattttgtacaagatgtgttttgttcaattcagattgacagtcatcatctcttcaaacagtgcttttccccaattctctccattttgaaatagatttaccttatttcatatattttttcctatttatacatctcttaacactgatagaaagtagttatctttttaatgctctgccttattgaagaaaaagccacccctttcctaaaatagtgatccttagaaa

SEQ ID NO: 488 - DNA, 2002 bp, Homo sapiens
cgcggcggtagttggaggcgggagagggtccgtagccgcgccgccctgccccgccatgggcctcctgtcggacccggttcgccggcgcgcgctcgcccgcctagtgctgcgcctcaacgcgccgttgtgcgtgctgagctacgtggcgtgcatcgcctggttcttggcgctggttttcccgccgctgacccagcgcacttacatgtcggagaacgccatgggctccaccatggtggaggagcagtttgcgggcggagaccgtgcccgggcttttgcccgggacttcgccgcccaccgcaagaagtcgggggctctgccagtggcctggcttgaacggacgatgcggtcagtagggctggaggtctacacgcagagtttctcccggaaactgcccttcccagatgagacccacgagcgctatatggtgtcgggcaccaacgtgtacggcatcctgcgggccccgcgtgctgccagcaccgagtcgcttgtgctcaccgtgccctgtggctctgactctaccaacagccaggctgtggggctgctgctggcactggctgcccacttccgggggcagatttattgggccaaagatatcgtcttcctggtaacagaacatgaccttctgggcactgaggcttggcttgaagcctaccacgatgtcaatgtcactggcatgcagtcgtctcccctgcagggccgaactggggccattcaggcagccgtggccctggagctgagcagtgatgtggtcaccagcctcgatgtggccgtggaggggcttaacgggcagctgcccaaccttgacctgctcaatctcttccagaccttctgccagaaagggggcctgttgtgcacgcttcagggcaagctgcagcccgaggactggacatcattggatggaccgctgcagggcctgcagacactgctgctcatggttctgcggcaggcctccggccgcccccacggctccatggcctcttcctgcgctaccgtgtggaggccctaaccctgcgtggcatcaatagcttccgccagtacaagtatgacctggtggcagtgggcaaggctttggagggcatgttccgcaagctcaaccacctcctggagcgcctgcaccagtccttcttcctctacttgctccccggcctctcccgcttcgtctccattggcctctacatgcccgctgtcggcttcttgctcctggtccttggtctcaaggctctggaactgtggatgcagctgcatgaggctggaatgggccttgaggagcccgggggtgcccctggccccagtgtaccccttcccccatcacagggtgtggggctggcctcgctcgtggcacctctgctgatctcacaggccatgggactggccctctatgtcctgccagtgctgggccaacacgttgccacccagcacttcccagtggcagaggctgaggctgtggtgctgacactgctggcgatttatgcagctggcctggccctgccccacaatacccaccgggtggtaagcacacaggccccagacaggggctggatggcactgaagctggtagccctgatctacctagcactgcagctgggctgcatcgccctcaccaacttctcactgggcttcctgctggccaccaccatggtgcccactgctgcgcttgccaagcctcatgggccccggaccctctatgctgccctgctggtgctgaccagcccggcagccacgctccttggcagcctgttcctgtggcgggagctgcaggaggcgccactgtcactggccgagggctggcagctcttcctggcagcgctagcccagggtgtgctggagcaccacactacggcgccctgctcttcccactgctgtccctgggcctctacccctgctggctgcttttctggaatgtgctcttctggaagtgagatctgcctgtccgggctgggacagagactccccaaggaccccattgtgcctccttctggggaaataaatgagtgtgttcacc

SEQ ID NO: 489 - DNA, 1590 bp, Homo sapiens
atcagctttgcctgctggcatagctatttctattctttgtaattcagtctttgattcctcattatccattctgccttcaccttccccactctcaaaacagtatgttggggtaccacagccttattgttagtttttcttgtttagcctttttttttttgcatgctatcataaaaaaagaaagtcttattttggactctacttctgctaaatgaggattatgcttcatctggcattcatagcactttgtaactggatcccaagttccttttccagcctcagcctctgccactattctgtgtatcggtgcctcagtcactttgacttttttgacctttattttcctgcctggcccttttgtttttattgttctaccttgaaacacacaagcacatgtgcatacacacacgtacatacacgctcttcagggcaggaattacatcctattcgtttctgtatatctaccctgtatacagcctggaacagaactttgcctgtaggcatttcaggaattatataacataatacatgaacatgtaaacaaaattgtactttggggaacatttcagaaacagaccagtggtatggagtataagaaaactgatgcacctcaaccggatgtgaaggaagaggaagaagagaaggaagaggaaaaggacaagggagatgaggaggaggaaggagaagagaaacttggtaagaaacagagtccagaaaatctgctttaagccaagaccctacgatgttgttaaacctttacagtcaagttaaggattgtttttagccaggcgtggtggctcaagcctgtaatcctagcactttgggaggttgaggcaggaggatcacttgagcccaggagtttaaggctgtagtcagccaggatagtgccactgcactccagctgagcggcagagtgagaccctgtctctctctctctctcttttttattttttaagacggggtcccactctgtcgctcaggttggagtgcagtggcacagtcacagttcactgcagccttgaccttataggttcaggtgatcctcctacctcagcacccctccaagtagctgggaccacaggcatgcgctaccatgctcagctgtttgtttgtttgtttgtttattgatttatttatttgatatggtctggccctgttgcccaggctggagtgcagtggtgtgatctcggttcactgcggcctttgcctcccagattcaagcgattctcccacctgggcctcccaaggtgttgggattacaggcgtgagccccccgccccagcgagatcctgtctcttaaaaaaaaattgttggccaggtgcggtggctcacgcctgtaattccagcactttggggggccgaagcaggcagatcccgaggtcaggaggtcgaggccatcctggctaacatggtgaaaccccatctctactaaaaatacaaaaattagccgggcatggtggcaggtgcctgtggtcccagctactcaggaggctgaggcaggagaatcgcgtgaccctgggaaggcagagcttgcagtgagccgagattgggccactgcactccaggctgggtgacagagcaagactctgtctc

SEQ ID NO: 490 - DNA, 1578 bp, Homo sapiens
ccacattcctcctctgaagaagcccctgggccacagctcatcaccatggactggacctggaggttcctctttgtggtggcagcagctacaggtgtccagtcccaggtacaactggtgcagtctggggctgaggtgaagcggcctgggtcctcggtgaaggtctcctgtaaggcctctggccgcaactttactacttttgcaatcggctgggtgcgacaggtcccaggacaaggacttgagtggatgggagggatcattcccatatatgacataaggcaacacgcaccgaagtttcaggccagagtcacggtaaccgcggacagagccacgagcactgtctacatggaactgcccagcctgacacctgacgacacggccgtctattactgtgcgacaggacgagacgccttcaaccgctttgacatctggggccagggaaccctggtcaccgtctcctcagcctccaccaagggcccatcggtcttccccctggcaccctcctccaagagcacctctgggggcacagcggccctgggctgcctggtcaaggactacttccccgaaccggtgacggtgtcgtggaactcaggcgccctgaccagcggcgtgcacaccttcccggctgtcctacagtcctcaggactctactccctcagcagcgtggtgaccgtgccctccagcagcttgggcacccagacctacatctgcaacgtgaatcacaagcccagcaacaccaaggtggacaagagagttgagcccaaatcttgtgacaaaactcacacatgcccaccgtgcccagcacctgaactcctggggggaccgtcagtcttcctcttccccccaaaacccaaggacaccctcatgatctcccggacccctgaggtcacatgcgtggtggtggacgtgagccacgaagaccctgaggtcaagttcaactggtacgtggacggcgtggaggtgcataatgccaagacaaagccgcgggaggagcagtacaacagcacgtaccgtgtggtcagcgtcctcaccgtcctgcaccaggactggctgaatggcaaggagtacaagtgcaaggtctccaacaaagccctcccagcccccatcgagaaaaccatctccaaagccaaagggcagccccgagaaccacaggtgtacaccctgcccccatcccgggaggagatgaccaagaaccaggtcagcctgacctgcctggtcaaaggcttctatcccagcgacatcgccgtggagtgggagagcaatgggcagccggagaacaactacaagaccacgcctcccgtgctggactccgacggctccttcttcctctatagcaagctcaccgtggacaagagcaggtggcagcaggggaacgtcttctcatgctccgtgatgcatgaggctctgcacaaccactacacgcagaagagcctctccctgtccccgggtaaatgagtgcgacggccggcaagcccccgctccccgggctctcgcggtcgcacgaggatgcttggcacgtaccccgtctacatacttcccaggcacccagcatggaaataaagcacccaccactgccctggg

SEQ ID NO: 491 - DNA, 1024 bp, Homo sapiens
ggtagactgaaggtagactgtggtagggtgaagatgtatactgccctagggcaaccagtagaataacaaaacagttatagctaataagtcaacaaaggagataagatagaatcacaaaaaaaatactcaacccaaaagaaggtggaaaaaggaacaaataagtagtgaaactaatagaaaaatggcaaggcaatagactgtaatcatatcagcaatcacattaaatgcatattatctaaatatcccacttaaaaggcaaagattgtcagataaaaagcaagactgcttttggacctggatgaacaggaggcaccatcacggaagttgactcctgccacaacaatgactgaaaggttcaacaccaggaacccaagagccaggacatctactgaaggctgttggttaagctgtatatgtttctggccagaagaaactctaccttcaaccaagttgtggtgaagaggttatttatgagttgcaccaaatggccatctctgtctctttcctggatgatctggaagatgaagcttcctggccaggaaaacaaaacagctgtggttgtggggaccatgttcaggaggtgcccaaactgaaggtgtgtgcactgcacatgagcagttgggcctgcagccaaatccccaaggctggggacaagattctcacctttgaccagctgaccctggacaccctcaaaggctgtggcaccatcctgctctctgggcctcacaagggccaagaagtgtactggcatttcagcaaggccctgggaacccagcatagccacactaagccctgtgtccactccagggaccagaaattcaagcacatcagaggctgatgggccagccaaggctacaaaaactaaccctggatcctctatcttattaaaaagattttggcctgggcgcagtggctcatccctgtaatcccagcactttgggaggccaaggagggcagatcacttgagcctaggagttcaagaccagcctgggcaacaagtgaaactccatctctataaaaaatt

SEQ ID NO: 492 - DNA, 1567 bp, Homo sapiens
  misc_feature 1352: n=a,c,g, or t
caagaaaaagagagggcatgggttgcggagccgacatcacggccggggtctttgctgtttagacgcctgggttcccggatcccagacacgcgcacgggcaggaagttagaccggagacagcgacgcctctgctggagttcctgctggccttgtacttcctctttgctgatgccatgcagctgaatgacaagtggcagggcttgtgctggcccatgatggacttcctgcgctgtgtcaccgcggccctcatctactttgctatctccatcacggccatcgccaagtactcggatggggcttccaaagccgctggggtgtttggcttctttgctaccatcgtgtttgcaactgatttctacctgatctttaacgacgtggccaaattcctcaaacaaggggactctgcagatgagaccacagcccacaagacagaagaagagaattccgactcggactctgactgaaggcctggcgggtgccttggcaacctgagccacacaggcctccacccctgcgcctcacaggggtcgctggcgttggagcggaggcctggacttctgagttgcagagggggctgcggacacagcaggccccctacagcctcaggttctgcctgagcccagcctaccaggcttgcccctcagctcagcactgttgaccacgctgcgtatgagggcatcttgggtatcccactccttctccccatttctgtcccacaggccttcagccctttaacgtctctgccaaaaaccagcacaaggagacaaagcagagccttgtctgtatctgggcagcaggtgttccatgctgctaggtggcgggggtcgggggtcttctgtttcactaacaggaacaaagacagaaaccatgacagggctgccccgccaggccccggtgggtttgtctgcacttggtgctcctgcccacaccagccactttggtgacaatgacccttccaagaatctttggttcaaggagcaccagttccctcttcattcttgaagcagggagaaattgacctttgccttgtcgcccaggaagtggggctcggcacccataactaacacctcccacccttggaaaccatgtcttctgggggtgagatgaccattctgggtctaagactgtttcaaagaagagctcatagactgactggtccagaagacagagggtacaacagtggcatcacagtgacagtgtcatggggagctgggcgggcccagccaaaccctccttcttcctagagcccagccagcaggcaggagttcctggaccctcaggacagtgaacttccagacctcagggcaggtctatgggccactgcaggagatgagaccagccttctgtgttcncctaacgatttatactgtgtatctgtctttgatggaattttgtaactttttatatttttttatgcaaaagcagcttcttaacagatggcattttctgtgactctaggcctcacaaaagagccagagttctggacccatgtttggagcatttgtagccttattctcttgcgtgtgaatctcttaccctgaaaaaaagccataatgaattaagccat

SEQ ID NO: 493 - DNA, 406 bp, Homo sapiens
ttttgtgtttctttgggatgttcacacctagaacccaaccctcatgttgtgagggagaacaagcagccccggtgaaaggccactggtaggtgttctggctgatgttccaactagtagccagcatcaaccaccagacatgatggtaagcaagcttcagatggtttcaacccttagctgctggttgggttacccctaacccctaacagtcttctcagctgaggaactagacatcgtgcagcagagaaaagccattccagttgcaccctgtctgcattcctgagccagaaaatctgtgagcagaatgaaatgctggctgttttacaccattaagtttggggtgatctgttacacaataatagttactggaacaaagttttcatttccttacatatatacattactaaac

SEQ ID NO: 494 - DNA, 939 bp, Homo sapiens
cgtcacaagagatgagttcctcagaaggcagaagacggagaccatcatctactcccgagagaagaaccccaacgcgttcgaatgcatcgcccctgccaacattgaagctgtggccgccaagaacaagcactgcctgctggaggctgggatcggctgcacaagagacttgatcaagtccaacatctaccccatcgtgctcttcatccgggtgtgtgagaagaacatcaagaggttcagaaagctgctgccccggcctgagacggaggaggagttcctgcgcgtgtgccggctgaaggagaaggagctggaggccctgccgtgcctgtacgccacggtggaacctgacatgtggggcagcgtagaggagctgctccgcgttgtcaaggacaagatcggcgaggagcagcgcaagaccatctgggtggacgaggaccagctgtgaggcgggcgccctgggcagagagactctgtggcgcggggcatcctatgaggcaggcaccctgggcagagagatgcagtgggtgcggggggatcctgtggcccacagagctgccccagcagacgctccgccccacccggtgatggagccccggggggacagtcgtgcctggggaggagcagggtacagcccattcccccagccctggctgacctggcctagcagtttggccctgctggccttagcagggagacaggggagcaaagaacgccaagccggaggcccgaggccagccggcctctcgagagccagagcagcagttgaatgtaatgctggggacaggcatgctgccgccagtagggcggggacccggacagccaggtgactaccagtcctggggacacactcaccataaacacatccccaggcaggacagatcggggaaggggtgtgtaccaggctatgatttctcttgcattaaaatgtattattatttcttc

SEQ ID NO: 495 - DNA, 629 bp, Homo sapiens
gtaaagagtagatgaacctctgcctgagtctcagatgcctgctgcccacttggttgcttagtggatcggctggctgtcaacagtgtaagcttatcaagcctaaatacttagttggtcttgactttttcacctcgaccatgactcagtgtcatgtgctcctagtcattctatctgtggtccaacgttagcctgggaagcacctgggactgagggaagaaccctcagctagttattcagcgatccaggttctcctcctgcctttgatatcacctcattatataaccttgggaaacactttggtgtgactggaatgtggatactcccaggggaagggtaggagcatggtagggcatttggactttatcatgaaggtggtaggaaatacttgaagggttttaagcagggatgacacatcatcaaatgtgtgttttgaaaacttttttctgcagaggacagggccacagcgcaagcaggatcaaaccagttaggagattgatgtaacagtcccgtcagaaagtgatgaggtagctgggtgcggtggctcatgcctgtaatcccagcatcgtgggaggctgagactggcagatagtttgagaccagcccttggcaacatggtgaaaccccttctc

SEQ ID NO: 496 - DNA, 720 bp, Homo sapiens
  misc_feature 62,671: n=a,c,g, or t
agaaaaaggaaatccccccttttcatgtattccttggtttgaggacatgactcctgtaaggnagaggaaagggagatgcttcctgtttgaactgcagtgaattcacggttcctgtttcaccactccaaaccttatggcgactcacacacacattcctcttttctgttactgccaaaggttcgggtttagtacacttcagttccactcaagcattgaaaaggttctcgtggagtctggggcgtgcccagtgaaaagatggggactttttaattgtccacagacctctctatacctgctttgcaaaaattacaatggagtaactatttttaaagcttatttttcaattcataaaaaagacatttattttcagtcaaatggatgatgtctccctcttttcccctattctcaatgtttgcttgaatcttttattattttttttaattctcccccatacccacttcctgatactttggttctctttcctgctcaggtcccttcatttgtactttggagtttttctcatgtaaatttgtataacagaaaatattgttcagtttggatagaaagcatggagaataaaaaaagatagctgaaattcagattgaagaaatttatttctgtgtaaagttatttaaaaactgtattatataaaaggcaaaaaaagttctatntacttgatgtgaatatgcgaatactgctataataaagattgaccgcatg

SEQ ID NO: 497 - DNA, 511 bp, Homo sapiens
cttaccctctagaatttctaatttatgtgttctgttgaaatttttgtttttttacctttattgaaacaacaaaaagtcagtattgaaacatatcttcctgttttctgttgtcaaatgatgataatgtgccatgatgttttatatatatcattcagaaaaagttttattttttaataacattctattaacattattttgcttgccgctggcatgcctgaggaatgtatttggctttgattacacactaagtttttgtaataaatttgactcattaaaaaccttttttttttaaaaaaaaaaaaaagaaaatctcattagtgaacttatctttgcagctgagtacttaaattctttttaaaaagaaaccctttggattgatcacattgtttgacccagtatgtcttgtagacacgttagttataatcaccttggatctctaaatatggggggagatgaaccagtccattcacattggaaaaactgatggttttaaataaactaattcactaat

SEQ ID NO: 498 - DNA, 634 bp, Homo sapiens
  misc_feature 317,454,458,461: n=a,c,g, or t
cgtgggggcggaggttgcagtgaactgagatcacgccactgcactccagcctgggcaacagagtgagactccgtctcaaaaacaaaacccacaaaactatggcaattgttaacatataataagcaaggattatgagaatagtacttggggtggtttaatttagaaaaaaggctggataatagccaataaatttcctgcctttttaagagaccaggtcatgctgtcacccagactggagtgcggtgtcacaatcacaggtcactaaagccttgatctcctgggctcaagtgttcctcctgtctctgcctcccaagtanctgggatcacaggcgcgtgccaccacacatggctaactttcttttaatttttgggagatgagtctcaatgttgctcaagctggtcctgaactcctggagccaaaaaataatcctcccaactcaagcctctcaaaaantgcnganattaacaggcctgagattacatgcccagacttggatttttttttttttttttttttttttttttgagacagagtctcctctgtcgccaagactggagtgcagtggtgcaatctcggcctcccaggttcaagcaattctcctgcctcggcctctctaagtagctggcttagaaa

SEQ ID NO: 499 - DNA, 601 bp, Homo sapiens
  misc_feature 377,565: n=a,c,g, or t
atttgttcagaatacattggcagctgctagtggtttccctggaagtggcagcagcagtgagcagtcagcagatggatgatcagttgagtttagctggagtggggagcaggagccccaggaacaggggtgttggctgagccccattctgggtcaggccctccccctttgcagggcagccgagggtcagatttttgcaccaaggagaactggcaggttcctgcctcctgacgtacctcacacccagccgggaagtcgatgggatgctgggacctggggaaccaaggataggggaaggagtcagcacagtgaaaggctgcctttatccctgcccacatgttccctctctcacagttttccccccacagagcccctttcantggccccttggtcctcctaactaagctgtcacctaccatatgtgggcctttttgttttataacaggagtattttctctccaggtccaccccaacctcccctgatttatagcctgaagccttatctttcacactagtgttggtcccttcaggtttggcccatcttgtattgctcttctgttcattcttncatcacagcaatttagtcactccctggtcatccccc

SEQ ID NO: 500 - DNA, 773 bp, Homo sapiens
  misc_feature 366,506: n=a,c,g, or t
tgcagattttggtattcaagcgagatgcttgaaccaatcacccatggatatctagggacagttatacaatggtgttgaagaactgacaaaacctggcagtttgacacagacatatgggaaaaattgaaggagtcaaaaggtcacttagttcatatcagaaatgaagtaaggaaggatgttgatttttggggaacctgaagagttgaggtagtctaggtttgaagtaatgtaaggatagcctagttaaagaattcttcagggatttttagcgatatggttgtggtaattgagctaaatattctgcaaaacagccatgctgttgttttgacaacctcttttagaacaattttttttttttggcttccnttttccccaagttaccttgtctgtatgtattgtctccattgattttagttttgtcttgtggagtaattcagaaagcgtttgataaaattttgtctttcagcgttggaagagagttttgtctttcgtgaggagttgggtcntggcgaggggtggtgctcacgcctgtaatcccagcactttgggaggcggagggaggtggatcatatgaggtcaggagtttgagaccagcctgaccaacatggtgaaaccctgtctctactaaaaatacaaaaattagcggggcgtggtggtgcgcacaggagaattgcttgaacccaggaggcgaaggttgcattgagccaagattgcaccactgcactccagcctgggcgacagtgagactctgtcccttcccccacccccccccc

SEQ ID NO: 501 - DNA, 1605 bp, Homo sapiens
  misc_feature 1605: n=a,c,g, or t
cccttctctacagaagcctctgagaggaaagttcttcaccatggactggacctggagggtcttctgcttgctggctgtagttccaggtgctcactcccaggtgcagttggtgcagtccggggctgaggtgaagaagcctggggcctctgtgaaagtttcctgcaaggcatttggatataccttcaacaactactatatgcactgggtgcgacaggcccctggacaaggacttgagtggatgggaatcagcaacgttaatggtggtggctcaaatttcgcacagaagtttcagggcagagtcaccgtgaccagtgacacttccacgaacacgatctacatggaactgagcagcctgagagctgaggactcggccgtgtatttctgtgcgagagcggggaccagtaggacgtacagtactcaggtttatgacaacaacatagacgtctggggcacagggaccacggtcaccgtctcctcagcctccaccaagggcccatcggtcttccccctggcaccctcctccaagagcacctctgggggcacagcggccctgggctgcctggtcaaggactacttccccgaaccggtgacggtgtcgtggaactcaggcgccctgaccagcggcgtgcacaccttcccggctgtcctacagtcctcaggactctactccctcagcagcgtggtgaccgtgccctccagcagcttgggcacccagacctacatctgcaacgtgaatcacaagcccagcaacaccaaggtggacaagagagttgagcccaaatcttgtgacaaaactcacacatgcccaccgtgcccagcacctgaactcctggggggaccgtcagtcttcctcttccccccaaaacccaaggacaccctcatgatctcccggacccctgaggtcacatgcgtggtggtggacgtgagccacgaagaccctgaggtcaagttcaactggtacgtggacggcgtggaggtgcataatgccaagacaaagccgcgggaggagcagtacaacagcacgtaccgtgtggtcagcgtcctcaccgtcctgcaccaggactggctgaatggcaaggagtacaagtgcaaggtctccaacaaagccctcccagcccccatcgagaaaaccatctccaaagccaaagggcagccccgagaaccacaggtgtacaccctgcccccatcccgggaggagatgaccaagaaccaggtcagcctgacctgcctggtcaaaggcttctatcccagcgacatcgccgtggagtgggagagcaatgggcagccggagaacaactacaagaccacgcctcccgtgctggactccgacggctccttcttcctctatagcaagctcaccgtggacaagagcaggtggcagcaggggaacgtcttctcatgctccgtgatgcatgaggctctgcacaaccactacacgcagaagagcctctccctgtccccgggtaaatgagtgcgacggccggcaagcccccgctccccgggctctcgcggtcgcacgaggatgcttggcacgtaccccgtctacatacttcccaggcacccagcatggaaataaagcacccaccactgccctgggaaaaaaan

SEQ ID NO: 502 - DNA, 1464 bp, Homo sapiens
ccttgtgtgtgctgggctctgaagtcctggaggcactcgctggggctgcccctcacagcctcttcttcaaggacgctctccgtgaccagggtgtgcttgcgtctccacagctttgatgcaggggcgactgatccgtgcccatagaatacctcttgtggcctctggatgcctccttgttgcttggacgctgccggcaccttcacggagcccatcacagacatggcccatgtaccagcctccagccttcactgaccctgtagcagccacctgggcagaaccagctccatggagatgctgtgctcactccagaattgcctgctggtggcaccccatactgctgcagactccacaaacaaaccaaaagctagaatattataaatgcgtatacttagatcagccagcccctttttccagggatcaaactaaaatcctgcctcagctatcttttttaatttttattgagtcataattcacatgccacataatttaccctgtgtggattgacttgaatctcacatttgagtgcttttttagcttagctcatggggttcaggagtgtgcacacacaatgaacgtgctgctggacacagtcccataactgcaccttcacctgcatgactcgaggggtagcaaaggagactgccattatgggcacaattcactttttcttcaaggcttcaataacctgaagtgtctctgtcggcaggtcggattgtttgtgctgaacgaactgtcctcttgcttcagaagccccttttgagtgtggtctctggtgcaagttcctgtgagctgcctggcccggtgatgctcgacagcctggactctgcaacacctgtcaactccatctgcagtgttcaagagctacgaagtgaagagtgtcctcggaaaggaagtggggttgttaaattgttttgtccagtccgtaaccgcccacccgaccagctgcattggattggaggaaatcgagcttctgagtgcaggaggggcctctgcagaacactagcggttgccgcaggatctgtgaactttgcaatgtggctgcaagggtggtggtggtggtggtgatttggggtagttatttgttaactatggacacagtgaacgtagtttacgatcttgaaatgaaacttagatttttctggggaaatgttcagatacagttttgtgaactgtaaatcaaaatacctttttctacagtttatcttttattttctgcaaatttaggaacatatttactcgttttcacattgaatcttaagtttaagctcttcatttggtatttaggcaatatatgagaaaaaaattttttttgttcatttgtaattttaacaagttgaacattttaccatgattgaacatgtttttattacagtatttaacattcccccaaagaataccctgcaaagtgtaaacctttgtcccatactgtgatattactgttctgctacaataaatgtcaaacct

SEQ ID NO: 503 - DNA, 2174 bp, Homo sapiens
atttaaggcccatctggcacccatggtttccatgctacttatcaccctcactcactcatgagccgctgtcaataacctcctctcactttttcatgatctttgctctctccttggaattttcacctgaatatttttgcagctcataccacacaattcatacattctaagtgtacaattcagtgttttttagtatgttcagagttgtacaaccattaccacaactttagaacatcgtttgttacctcaaaatgaaatgccatacccttttctttcccactccaatccgtccatctctcctagccctaagggttttatagtttggctcttacatttatatctttgatccattttgagttaatttttgtatgtgatatgagctaaggattcagttttattcttttgcctgtggctgtcctgttgttccagcaccatgtgtagaaaagactgttctctttttatcaaatggtcttggcactcttgtcaacaaccaattgacagcagatatatagttttatttttgtactttcaatgctatttcacttatttatatgtctatccttatgcgagtaccacactatctttagtactgttgctttgtagtaagtttttaaattggggcatgttagtttcaactttgttattctttttcaagattgttttagctattttgaggcctgtgagtttccaaatgaattttagaatcagcttgttaatttatacaaagaagccaacttgtgttttggtagaaattgcaccgaatttgtagattatttcagggattatcataatctcaacaatatgaaggcttcagttcagatccatgaacatgggatattttttccatttatttagatcttcgatttctttcagtaatgttttgtagatttcagagtttttgatacttttgctaaattttttcctaagcattttattacttttgttgctattatatatgaaattattttcttaattttacttttgggttgttggttgctagtatgtgggaagacagtggatactgtattgattttatattttacaaccttatgaactcagttattctcattgttttttagtggattccttagaattttctctttatgagagctgttttacctcctcctttccaatctggatgtctttaattttattttcttggcaattactttggctgcaacttctagtacagtgtggaatatagatggcaagagcagacatccttgtcttaaatcttaaggggaaagcatccagtcattcaccatagaatattatgttatctgtaagatttttttgtgtaaaccttgtcagattttacaaatgcccttctattttttgtttgcagaatgatttatcatgaaatgttgaattgtgtcaaatgccttttctatgtctatgtggcttttattttttgtatcttcctttttatatatttctggatttcatttgttagtattttacttaaaatttttccacgttcatgagggatattagtttgtagttttcttctggtattatagtatctttgtatagtttttgtttcaggactatcgagtctcataaaatgagtaaaatttgatagtttttcttttttgaatgtttgaaaaaattcattattgacgccatctgggtcttgaattttctttgtgggaaagttttgaattatgaattgagttttttgatataaggctcttcagattttctgtttcctctagagtcttttggtaattctcatgtcttaaaaatgtacattttggccgggcacggtggctcacgcctgtaatcccagcactttgagaggctgaggcgggtggatcacctcagttcgggagttcgagactagcctgaccaacatggagaaaccccatctcaacaaaaaatacaaaattagccgagtgtggtggtgcacacctgtgatcccagctactcgggaggctgaggcaggagaattgcttgaacccaggaagtggagtgagctgagatcacaccattgcactccggcctgggcaacaagagtgaaactccatctcaaaagaaagaaagaaagaaaatgtgtagtcccagctactcaggaggctgaggcaggagaatggcgtgaacctgggagccggagcttgcagtgagccgagattgcgccactgcactccagcctgggcgacagagcgagactctgtctc

SEQ ID NO: 504 - DNA, 1460 bp, Homo sapiens
  misc_feature 1070: n=a,c,g, or t
atctgctcgcggcgccgcctcctgctcctcccgctgctgctgccgctgccgccctgagtcactgcctgcgcagctccggccgcctggctccccatactagtcgccgatatttggagttcttacaacatggcagacattgacaacaaagaacagtctgaacttgatcaagatttggatgatgttgaagaagtagaagaagaggaaactggtgaagaaacaaaactcaaagcacgtcagctaactgttcagatgatgcaaaatcctcagattcttgcagcccttcaagaaagacttgatggtctggtagaaacaccaacaggatacattgaaagcctgcctagggtagttaaaagacgagtgaatgctctcaaaaacctgcaagttaaatgtgcacagatagaagccaaattctatgaggaagttcacgatcttgaaaggaagtatgctgttctctatcagcctctatttgataagcgatttgaaattattaatgcaatttatgaacctacggaagaagaatgtgaatggaaaccagatgaagaagatgagatttcggaggaattgaaagaaaaggccaagattgaagatgagaaaaaggatgaagaaaaagaagaccccaaaggaattcctgaattttggttaactgtttttaagaatgttgacttgctcagtgatatggttcaggaacacgatgaacctattctgaagcacttgaaagatattaaagtgaagttctcagatgctggccagcctatgagttttgtcttagaatttcactttgaacccaatgaatattttacaaatgaagtgctgacaaagacatacaggatgaggtcagaaccagatgattctgatcccttttcttttgatggaccagaaattatgggttgtacagggtgccagatagattggaaaaaaggaaagaatgtcactttgaaaactattaagaagaagcagaaacacaagggacgtgggacagttcgtactgtgactaaaacagtttccaatgactctttctttaacttttttgcccctcctgaagttcctgagagtggagatctggatgatgntgctgaagctatccttgctgcagacttcgaaattggtcactttttacgtgagcgtataatcccaagatcagtgttatattttactggagaagctattgaagatgatgatgatgattatgatgaagaaggtgaagaagcggatgaggaaggggaagaagaaggagatgaggaaaatgatccagactatgacccaaagaaggatcaaaacccagcagagtgcaagcagcagtgaagcaggatgtatgtggccttgaggataacctgcactggtctaccttctgcttccctggaaaggatgaatttacatcatttgacaagcctattttcaagttatttgttgtttgtttgcttgtttttgtttttgcagctaaaataaaaatttcaaatact

SEQ ID NO: 505 - DNA, 1563 bp, Homo sapiens
cagctcatcaccatggactggacctggaggttcctctttgtggtggcagcagctacaggtgtccagtcccaggtccagctggttcaatctggggctgaggtgaagaagcctgggtcgtcggtgaaggtctcctgcaaggcttctggaggcagtttcaatagttatagtatcagttgggtgcgccaggcccctggacaggggcttgagtggatgggaaggctcatccctgtccttaacattgcaaattacgcagagaagttccacgacagagtctcgatcaccgcggacacatcaacgaccacagcctacatggaactgagcgtcctcagatctgacgacacggccgtgtatttttgtgtgagagacccattttgtactatagccagctgctatattgagcgaaacttctactacggaatggacgtctggggccaagggaccacggtcaccgtctcctcagcatccccgaccagccccaaggtcttcccgctgagcctctgcagcacccagccagatgggaacgtggtcatcgcctgcctggtccagggcttcttcccccaggagccactcagtgtgacctggagcgaaagggaacagggcgtgaccgccagaaacttcccacccagccaggatgcctccggggacctgtacaccacgagcagccagctgaccctgccggccacacagtgcctagccggcaagtccgtgacatgccacgtgaagcactacacgaatcccagccaggatgtgactgtgccctgcccagttccctcaactccacctaccccatctccctcaactccacctaccccatctccctcatgctgccacccccgactgtcactgcaccgaccggccctcgaggacctgctcttaggttcagaagcgaactcacgtgcacaatgaccggcctgagagatgctcaggtgtcaccttcacctggacgccctcaagtgggaagagcgctgttcaaggaccacctgagcgtgacctctgtggctgctacagcgtgtccagtgtcctgccgggctgtgccgagccatggaaccatgggaagaccttcacttgcactgctgcctaccccgagtccaagaccccgctaaccgccaccctctcaaaatccggaaacacattccggcccgaggtccacctgctgccgccgccgtcggaggagctggccctgaacgagctggtgacgctgacgtgcctggcacgcggcttcagccccaaggacgtgctggttcgctggctgcaggggtcacaggagctgccccgcgagaagtacctgacttgggcatcccggcaggagcccagccagggcaccaccaccttcgctgtgaccagcatactgcgcgtggcagccgaggactggaagaagggggacaccttctcctgcatggtgggccacgaggccctgccgctggccttcacacagaagaccatcgaccgcttggcgggtaaacccacccatgtcaatgtgtctgttgtcatggcggaggtggacggcacctgctactgagccgcccgcctgtccccacccctgaataaactccatgctccccc

SEQ ID NO: 506 - DNA, 1423 bp, Homo sapiens
ggattgcttgaggccaggagctcgagaccagcctggccaacatagcaaaaccctgtctgtactaaaaatacaaaagttagccaggcatagtggcaaacgcctataatcccagcaacttgggaggctgaggcacaagaatcgcttgaaaccaggcggcggaggttgcagtgagctgagatcgcgccactgcaccccagcctgggcaacagggtgagactcagtctcaaaaaaagtcagctttgatgaccttagtaagccctgaatcgactccacctaaccttgctgggtccctttcctgcacttctggctcttggcaacactttctagcctcagcatccttagctgtgttgctccggttgctagacatcactgtgagctcctgccgtatgctgcctgccctgaaggacggtctttgaggcctcccctgtgttgtcctcccttagccccacccgaatgagagttctctcccttgtaccttccgtgggtcccttttgtgaccgctgtacctaggaagcgcgtggtaactgggctcagtgatgaggagagactgccctgggcccaaagagctacaccttcctcctttcccccttgttatgtgttcttcatccaggagcttttgctgtatttcagtaggtgcctccattctaggaggcttttattccccttttacaagtgaggaaaccaagacccacagaaatagagtaacttgctgaagtctcatagttggtgggcgcagagctgaggtcacacctgcgtcctcctgccgcagagccctgctgttccagatggcctgctgggcacctctcccagagcagcacccggccagtgtgtctggaatgaatgctgagtggctcggacacttacttgtcctcttgtcccttgtttcttttcttcctctgaaataagtgctagtctatcttagtagaatgctaatggcaatgcagtctaaattgatgagaacgaagttttagagtaaaatccactcctgaaagatccagaattccctgactgtcacttattgacctgcactggcctgttttttttttgtttttgttgttgttgttgttttttcgactaaatagattctccctgggcaagacccctccacctccattctgaactttaaaacaactttccaggccgggtgcagtggctgacgcctgtaatcctagcactttgggaggctgaggcgggtggatcacctgaggtcaggagtttgagaccagcctggccaacatggtgaagcctcgtctctactaaaaatacaaaacattagcctggcgtcctggcggacgcctgtggtcccggccactcgggaccctgaggcaggggaatcgcttgggcccaggaggcggaggttgcagtgagccgagatcgctccactgcacactccagcctgggcaacaaagtgacactacgtctc

SEQ ID NO: 507 - DNA, 1576 bp, Homo sapiens
ccacccagctgggatctcagggcttccttttctgtcctcctccaggatggggtcaaccgccatcctcgccctcctcctggccgttctccaaggagtctgtgccgaagtgcagctggtgcagtccggagcagaggtgaaaaagcccggggagtctctgcggatctcctgtcagggttctggatacaccttcaccagttaccggatcagctgggtgcgccagatgcccgggaaaggcctggagtggatgggtaaaattgatcctgctgactcttacacgtcctacgacccggccttccaaggccacgtcaccatctcaattgacaagtccatcagcactgcctacctgcagtggagtagctgaaggcctcggacagcgccatttattactgcacgaagagcgctcacgtattacgatattttgactggggtcaggggaccctggtcaccgtctcctcagcctccaccaagggcccatcggtcttccccctggcaccctcctccaagagcacctctgggggcacagcggccctgggctgcctggtcaaggactacttccccgaaccggtgacggtgtcgtggaactcaggcgccctgaccagcggcgtgcacaccttcccggctgtcctacagtcctcaggactctactccctcagcagcgtggtgaccgtgccctccagcagcttgggcacccagacctacatctgcaacgtgaatcacaagcccagcaacaccaaggtggacaagagagttgagcccaaatcttgtgacaaaactcacacatgcccaccgtgcccagcacctgaactcctggggggaccgtcagtcttcctcttccccccaaaacccaaggacaccctcatgatctcccggacccctgaggtcacatgcgtggtggtggacgtgagccacgaagaccctgaggtcaagttcaactggtacgtggacggcgtggaggtgcataatgccaagacaaagccgcgggaggagcagtacaacagcacgtaccgtgtggtcagcgtcctcaccgtcctgcaccaggactggctgaatggcaaggagtacaagtgcaaggtctccaacaaagccctcccagcccccatcgagaaaaccatctccaaagccaaagggcagccccgagaaccacaggtgtacaccctgcccccatcccgggaggagatgaccaagaaccaggtcagcctgacctgcctggtcaaaggcttctatcccagcgacatcgccgtggagtgggagagcaatgggcagccggagaacaactacaagaccacgcctcccgtgctggactccgacggctccttcttcctctatagcaagctcaccgtggacaagagcaggtggcagcaggggaacgtcttctcatgctccgtgatgcatgaggctctgcacaaccactacacgcagaagagcctctccctgtccccgggtaaatgagtgcgacggccggcaagcccccgctccccgggctctcgcggtcgcacgaggatgcttggcacgtaccccgtctacatacttcccaggcacccagcaggaaataaagcacccaccactgcctcctggg

SEQ ID NO: 508 - DNA, 215 bp, Homo sapiens
agtgaaagggacaaataacatctgtgtagcagtattatgaaaatagcttgacctcgtggacttcctcagagggttggtccctggatcacactttgagaaccatacttgtcctgaagtattggagttcatgtctaacttcttcccagggcattatgtacagtgctttttattactgtggggagagggcagtgctaaataaattaatcactactgat

SEQ ID NO: 509 - DNA, 1482 bp, Homo sapiens
attctgtgctgtcaatccattgtgaacactgattattcaaagaaataatagttatttagatttaaaatattttaagtttaaaataataggttattaagatagctatttattaatggcctgatttattaaaattagtcatttaaaatattatcaaataataaagcagtgtctgaattatttctcctaaatgttcatttgaggcagtaaggtgattgcctgcttttcctctcttcactctttttataggtattgatgatattgatggaatttggaacatgagccattaaatacctagaaaaaaattccatagggttttaggtaattgaagcaaaattaatattgctacttttagtaggagactatcttattttgcctttgtgaggcagaatctttttcctgtttgttggagccactggccaccaggtggtgctttttgcattctttacagaataacacgacggtttttcctctggttactgtcagacattgtcatatttagctaattaaaatttccaatgacaaatataatgtaggaagttagaactaatatgaaacttcttgctgtggtagatagctgttcaaagaaggaagagtttgttactgaatttgttggtatccactgagctttagtgttgtctgcttccctctctctgattcttaggctatggtggcagatagtttcttgcagttgccagcaactaggttctcagattattcgaggtcctcagtatatagaacctttggacttgtccacctcagtgctaaacattttatcttttattgggtgcttatttcaatgccttatctgaaatttatctgaaattgtctcctagaatctatatggttccaagaaaaaaagtaaccttatttataagatttctcttttctccctaaaagccatagtagaagaataaaaatgtttgtttgaagtgtccttccatagggtatttttccttatcgttatctactgtttttattacctttagcactctgggtgtccagccaactcatcttaagttcaaggaatcagtattttgcagtttcttcatttttgttctgatggctttttttaaaagtataatcccagcttggttctgttgtttaaggagagctaaacttataatttaaatctgcatgatatacatatattaagttttaataactcactaaaattgttttttaaacaaagaatacagtttttccggccgggcgcggtggctcaagcctgtaatcctagcactttgggaggccgaggcaggcggatcacgaggtcaggagttcgagaccatcctggctaacacagtgaaaccccatctctactaaaaatacaaaaaattagccaggcgtggtggcaggcacctgtagtcccagctactcaggaggctgaggcaggagaatggcgtgaacccgggaggcggtgcttgcagtgagccgagatggcgccactgcactccagcctgggtgacagagcgagactccgtc

SEQ ID NO: 510 - DNA, 1403 bp, Homo sapiens
gagtccaggagttcaagaccagcctgggtaacatggcaaaacctcatctctacaaaaaaaaaaaaaaaatctttttaattagctgggcaaggtggcacacacctgtagtcccagctactcaggaggctgaggtggaaagatgagcctgggaggcagaggtcgcagtgagccaagagtgcaccactgcactccagcctggacaacagagaccctgcctcaaaaaaaaaaaaaagaaaaggaaagaaaagaaaagaaataggctcctcaggtatggttcattgggtgcagctccttgggtgcacctcctcttgaactagaggcctgtgagctgaaaaattgtttcttccctgctgccaacagtcagtgatgaaacagggactgaacaactactatagacacttccattcaaacggggaaaaaggaagcagcagtcactcatttatagcaattctgaaatccagtcaagcacatgttgctagttccccctaatcccagggcaggaaattttccttgatacatgatttatatgtatgatacacctctaattcccatcccatcccatcctaccccacaggcttcttccttgtcttcgtcggttctgtattggtgtctcccttctccaacagtattatttactcacttgctcaatccccaggtacaacaataaaagttaacagaatttcaacactcagaccactatgaaaaacaaactaagttgatttctaaatttctgtggagtttatttttgttttagatttaatataccattgcagagggtatttaatgtaccattgcagaggattttacatttgtatttataaatgagattggtctatagtttttacacactgtcatagtcagatttacggttatcctacctcggtaaaataacttgtaaaattttctaccttttaatatattctggaataatttatagtgttttaaattaaccaaaagtgtgtgacccagagttcactggagagacagtggtgaccacattatctgctttctttatggtttttaggctatgcagatattctgttggtttttgagacagctctgcttttatgtttttctaagaagtcatctatttcatttgtggttaaaagtaatataggtggtctgccaggcgcagtggctcaggcctgtaatcccagcactttgggaggctgaggcgagtggatcgcgaggtcaagagatcgagaccagcctgaccaacatggtgaaaccccgtctctactaaaaatacaaaaattagccaggcgtggtggcgggcgcctgtagtcccagctactcaggaggctgaggcaggagaatcgcttgaacccgggaggtggaggttgcagtgagccgagatcccaccactgcactccagcctgggcaacagagtaagactctgttcc

SEQ ID NO: 511 - DNA, 1875 bp, Homo sapiens
atatttttggagagttgattctgcaacttgctttctccttgtattttcaggggcgtctgccttggatataaaatcatagatgggtgtgttgctaagaaaaagctctttgcaaccagtattaacaccacactccatgtgacatgtcttcctgtcatttttcattgtcctttgaccaggtgggctggatgacactttgcacacaattattgattatgcctgtgagcagaacattccctttgtgtttgctctcaaccgcaaagctctggggcgcagtttgaataaggcagttcctgtcagtgtggtggggatcttcagctatgatggggcccaggtgagtgcacagggcacaggcctcttcagtcactgcccgtgggaggaagtgggggcaggtggtcagtgtgggctcacccacagagcagccccagaacctccagtaggctgtcattgaggaggagccaccacttaggcagaaccttcttataaaaaagtagcctttgtctccttgacatcatgggttgtctggttctgaactgagctctgttctgggcttgctgctgacatagtggcacctcaggcaggcccaagaagtcggcctagcccactctttcctctggggcagcatccctggtacccacccataagcatgaggtccacattaccccatgtcacccctgcttctctgtggaggtggccattgctgagtttgagggacccgtgtcctctgtagctgggatgttacctgtgtgctctcacttgtgcccaaggatcagttccacaagatggttgagctgacagtggcggcccgacaggcgtacaagaccatgctggagaatgtgcagcaggagctggtgggagagcccaggcctcaggcacctcccagcctacccacacagggccccagctgccctgcagaagatggccccccagccctgaaagaaaaagaagagccacactacattgaaatctggaaaaaacatctggaagcatacagtgggatgtaccctggagctagaagaatcctggaggctcaacctctcaaatgatgaatttgaatttatgagagttcttgcctgtgtgtctgtattttgggtaaggaggggaggtctgaaaaagactttggggctttttcttctgtttttcatgacaatgtaatttgtgtaactgttgaatctggaaattgatcagcattaaagggcacatgaagcagtgtctgcaggcgttcagtgctgcggagcctgttaaaggtcactcagatgtgcaggtgttaatcttctctaaaagcctggtgatacagctctggctttctgagcacactacggatctggaaaatactggaaaatgtgatacttagaatactttggctgctaaggaaacttcctctccattgcagaatagctgagccaagtgagtgagtttgcagaaagcaggtggtgagctcctgcctgctggaggttgccatggagggccattcctgcccggcaacagcaccgtcctgcagggagccacttggcagaagggtgcagggctgctggtgtcagagcaagagggctacagggaaagggccctttctcaggggatgtagcttttttaaaagatttgggaacacttggaggatttgctaaaatgagcctcagaaggaaaattggttttctaacctgtgactttttgaaatgaattattcctttcagtctttatttttcaaagaaacaatgtgtattgaagtacctagatttgtttgataatcaacaaatctttcctttttcaatgaacatattctgaatgtggtttctgtcttagaccaggaggacagagtttgctttcatattttccctgtaagtaagagggcttatttattttaaataaagagtaattatc

SEQ ID NO: 512 - DNA, 1426 bp, Homo sapiens
ctatgatgctgtatttgatcactcctatcctaacccagagtacgacaactggtgcaaacaaactcaagtgcaaaggaaacgcgacgaagaacttgccaaatctatggccatatccttgtctaaaatgtatattgaacaaaatgcatgctcttgaaatgtctcaaaaccttacaccctgggaataattgcatatataacttgtgtttggagaatcacatgaactttaatcagggtaatagcactttcaaacttgctagtagattttactgtaggtgtaatgccttaatcatctttttgaatgttttctcagagctggaggttgctgggcacctaaatgatgtttcatgatagctttgggtgattttactgctatttataatttgctgtataaagtgagcattacttaatttgcaagctgatttctcacagtgtaaatttgttcattcctggtagtctattttctataaaaatgtatttttgcacaacatttttaaaaactggtgtaccttcatctatgacgtgttccattttgacaaacagctttcaggcgtaaatccagagaagtgctttatatgaaatgtattattttgaacagagtttgtgatttggtagttattttatgttgttgaaatttgaatttcacaattcttagataattatttcaaatggatattgatgcattcttgttaccagatgtttggcccattccattttgatgaaacagagctgttgttttggaagtcattatttttctagaaatggcgaatcttttaaagaaaattactaaatggaaggttgtgggaaggtgtttttttgtgttttttttttggtttttgttttgtttttcctcttttaagggatagtagcaggtcttacttgaatgaaagtctgatatttgctgatggcagaatgattattctgtaccctggttgatgtgtagagtagattgtctggtgctctcagttgtttttatttacatttgtcacgttgttgtaagagaatgttaacatggtataaaactctgtgacaagataagcctcctgctttatataacttcttgaatccagctaagagatttataaactaatggcataaatgtctggagccaaccttggcagttatagcaggagaacactgtcttaatatttctttacattctttcaaaaggcaaaataggattgccctgtattgatgtagaaatgtctgtaaacagagcttgtatggtttgctgggtcaaacaatgtttccaacttaaaatcaatctcattgccactttaactacttttagtcatatttattaagtaatgcagtttgtactttttttattttgtaacattttgtgatttttttgtacaaaactgtatttgtacaatagagcaattcccagctgatggaatgaatgaataaaatgcaaaattatactttt

SEQ ID NO: 513 - DNA, 1617 bp, Homo sapiens
cacccgtccttgggagaatcccctagatcacagctcctcaccatggactggacctggagtatccttttcttggtggcagcagcaacaggcgcccactctcaggttgaattggtgcagtctggatctgacgtgaagcagcctggggcctcagtgaaggtctcctgtaaggcttctggttatccctttagtaattttggtattagttgggtgcgccaggcccccggacgagggcttgagtggatggcatggatcagaggcaacaatgaaaatacaaagtatgcacagaagtttaaggggagagtcactttgaccacagtcacatccacgagcacagtttacatggaggtgaggagcctgacatttgacgacacggccgtttattactgtgcgagagatgaagggccgctaggacactgtactattgagaactgccactattcctactactataactcaatggacgtctggggccaagggactgcggtcaccgtcttctcagcctccaccaagggcccatcggtcttccccctggcaccctcctccaagagcacctctgggggcacagcggccctgggctgcctggtcaaggactacttccccgaaccggtgacggtgtcgtggaactcaggcgccctgaccagcggcgtgcacaccttcccggctgtcctacagtcctcaggactctactccctcagcagcgtggtgaccgtgccctccagcagcttgggcacccagacctacatctgcaacgtgaatcacaagcccagcaacaccaaggtggacaagagagttgagcccaaatcttgtgacaaaactcacacatgcccaccgtgcccagcacctgaactcctggggggaccgtcagtcttcctcttccccccaaaacccaaggacaccctcatgatctcccggacccctgaggtcacatgcgtggtggtggacgtgagccacgaagaccctgaggtcaagttcaactggtacgtggacggcgtggaggtgcataatgccaagacaaagccgcgggaggagcagtacaacagcacgtaccgtgtggtcagcgtcctcaccgtcctgcaccaggactggctgaatggcaaggagtacaagtgcaaggtctccaacaaagccctcccagcccccatcgagaaaaccatctccaaagccaaagggcagccccgagaaccacaggtgtacaccctgcccccatcccgggaggagatgaccaagaaccaggtcagcctgacctgcctggtcaaaggcttctatcccagcgacatcgccgtggagtgggagagcaatgggcagccggagaacaactacaagaccacgcctcccgtgctggactccgacggctccttcttcctctatagcaagctcaccgtggacaagagcaggtggcagcaggggaacgtcttctcatgctccgtgatgcatgaggctctgcacaaccactacacgcagaagagcctctccctgtccccgggtaaatgagtgcgacggccggcaagcccccgctccccgggctctcgcggtcgcacgaggatgcttggcacgtaccccgtctacatacttcccaggcacccagcatggaaataaagcacccaccactgccctggg

SEQ ID NO: 514 - DNA, 2335 bp, Homo sapiens
  misc_feature 1123,2095-2097: n=a,c,g, or t
tccatcttgaattaatttttgtctaaggtgtaaggaagggatccagtttcagctttctccatatggctagccagttttcccagcaccatttattaaatagggaatcctttccccattgcttgtttttctcaggtttgtcaaagatcagatagttgtagatatgcggcattatttctgagggctctgatctgttccattggtctatatctctgttttggtaccagtaccatgctgttttggtgactgtagcctcgtagtatagtttgaagtcaggtagtgtgatacctccagctttgttctttttgcttaggattgacttggcgatgcgggctcttttttggttccatatgagctttaaagtagttttttccaattctgtgaagaaagtcattggtagcttgatggggatggcattgaatctataaattaccttgggcagtatggccattttcacgatattgattcttcctacccatgagcatggaatgttattccatttgtttgtatcctcttttatttcgttgagcagtggtttgtagttctccttgaagaggtccttcacatcccttgtaagttggattcctagacattttattctctgtgaagcaattgtgaatgggagtttactcatgatttggctctgtttgtctgttattggtgtataagaatgcttgtgatttttgcgcattgattttgtatcctgagacttcgctgagtttgcttatcagcttaaggagattttgggctgaggcgatggggttttctagatatacaatcatgtcatctgcaaacagggacaatttgacttcctcttttcttacttgaatgccctttatttccttctgctgcctgattgccctggccagaacttccaacactatgttgaataggagtggtgagagagcgcctccctgtcttctgccagttttcaaagggaatgctttcagtttttgtccattcagtatgttattggctgtgggtttgtcatagatagctcttattattttgagatatgtcccatcaatacctaatttattgagagtttttagcatgaagcgttgttgaattttgtcaaaggccttttctgcatctattgagataatcatgtggctttgtctttggntctgtttatatgctggattacgtttattgattttcgtatgttgaaccagccttgcatccagggatgaagcccacttgatcatggtggataagctttttgatgtgctgctggattcggtttgccagtattttattgaggatttttgcatcaatgttcatcaaggatattggtctaaaattctcagtatgttgtattcaggaaacccatctcacgtgcagagacacacataggctcaaaataaagggatggaggaagatctaccaagtaaatagaaaacaaaaaaaaggcagggtttgcaatcctagtctcggataaaacagactttaaaccaacaaagatcaaaagagacaaggccattacataatggtaaagggatcaattcaacaagaagagctaactgtcctaaatatatgtgcacccaatgcaggagcacccagattcataaagcaagtccttagtgacctacaaagagacttagactcccacacaataataatgggagactttaccaccccactgtcaacattagacagatcaacgagacagaaagttaacaaggctatccaggaattgaactcaactctgcaccaagcggacctaatagacatctacagaactctccaccccaaatcaacagaatatacattcttttcagcacgacaccacacctattccaaaattgaccacatagttggaagtaaagcactcctcagcaaatgtaaaagaacagaaattataacaaactgtctctcagaccacagtgcaaacaaactagaactcaggattaagaaactcactcaaaactgctcaactacatggaaactgaacaacctgctcctgaatgactactgggtacataacgaaatgaaggcagaaataaagatgttctttgaaaccaacgagaacaaagacacaacataccagaatctctcagacacattcaaagcagtgtatagagtggaagttatagcnnntaaatgcccacaagagaaagcaggaaagatctaaaattgacaccctaacatcacaattaaaagatctagagaagcaagagcaaacacattcaaaagctaacagaaggcaagaaataactaagatcagggcagaactgaaggaaatagagacacaaaaaacccttcaaaaaatcagtgaatccaggagctggttttttgaaaggatcagcaaaattgatagaccactagcaagactaat

SEQ ID NO: 515 - DNA, 1604 bp, Homo sapiens
  misc_feature 1486,1487,1490: n=a,c,g, or t
attaaaaacaagaataacaccttgcccaaaaatataagggttggtccagtattgggctgctatggtaaaaagaatggatagaagatatcataaaataagaaggaccatgatgttctacaggaaagctaaagtctgtgagaaaccagactcaaacaggttgagaagttctatggaatggtggattaagtagccgcttgataacgttccctttattgcttacatttatgttctaaggataatactattcaaattgtttaagagtaccaccactcaatcaaggtaaagttttcctgctaattacttactatgcattgtaatgataaaagaagtaagaaaatgcacacacacacacacacacacacacacacacacaaagctgagaccaagaaaataatactgttttgagtgctagcatggaattcttgaacaactgctgctgagtttcttttaattgccttcaatccagaataagactgtagttccagtactcatgaggcatttctaagattttatctcctacagtgcactttgtacctccacaaaaaatccccatttctcgaatctgagttacatgtaacccttcaagtctacttaagagggtgttatactttccaagtcactaccacctctaccaaatccctcaacaacatattattattttttatttttatactttttggttagcattgctgtcactcctatcaacaaccttttgaagaagtgcggatctctcattcatgagtatggaaactcagagaatgtaagtgacttccttttgtctctaacctgtgttcaagcctataggtaagcaactgccagatgtggtatttctctaactagactttttaccctccctgagaacactccagccccataaatttttcccagagatgttacatgttcctaagaagtgacttacataaacacaaaaaactagtacccttacctatttattatttttctcctcctttcctggtatgctatgctaatgtcatcttttcatggtgatgcctgcccatgtcactactgacacttataatgcccagtattgatggcactatattttatgctaatgatgccattcttttccccagtcaccagcactcccctgtcactatcaaatcacccccattcttatcagtcctcaaatggctgtcatcaatgcatctaatgtttaccaacagactctttttagtcttctttatgttctctttgcatatttcttgcactaaaattcagaaatgataaagtcaaaaccattacaaaccccagtattcctcctacacacacacttacacacataccagatatgcttgctcattgaccccgaactaaactagtaaacatctctctttccctttaggtcaggatgtatgttcttccatttccacctcctggctcttgacctcatctcttgtaaatggatccctcgtggacccaccctacagtcctgcagacatgcccagacatggctaaatcccagggnnggnacagatcttgacatctactacactactaattagcaatgaagtacttttcattatatacacacagtctcttttgcagattgttgctgatgatttacataacttgccctttatttc

SEQ ID NO: 516 - DNA, 1345 bp, Homo sapiens
cttggctctgaagggcaggacctaccccattctgcactgttcaaagcagggcccactgaaaccccaacatagccgtccatggtgtgatcctggcaagttcacgtactgtcgacccatccccacaccaggcgaacccctgaacccggccctgacctcatgggctgtgggctaaggggccaggctaagcttgctgtgggccacagcacctgctcagggactgcagtgactgcccaacaccctggggccacaaggctcccaggcagaggagcctccagcttggccacctcctccccttcactggcacactcttcctgcctgccctgcagggttctcatggcaacagtagctgtgggggtggaggctgggcgctgctgacagctggagggggcaggagcctgaaggcggggggcagggctgcaggcggctgcctgggagccttgcagagtggacttccacctcctggggctgaggtcgccaagcgtgctgcgtgcagctgctgagccctggcacagtgggctggaatgtacccagggtgtggccagacttggtgggacgtcctcacaccactgctgggcagcctcctgccaacccacggcagcctgggcccggggcagcgggagcagaggtacaggcagaagaacagacacacgcagagtgaaacaggagtgctttatggtctgagtggagtgtttgggaggagtgctcccggctcctgcttcgggctcacctgagcgggggcgcagctgaggccactgtgggaaacacaacccccactcccaggagaggcctcacatgctgcttcggtctcgccagccttctagcgtggggcctgggccgccctttagggtgagtctgcacacccgtgttcagggctcccggccggaagcggaaccataggcatgctgcggccccagatgagcgcggagggcaagcaggtgccggggcagcgcacaccccacagccaagcggcccctgcccagcctctgtaaacagaccctcacaggtccctcctgggcctcagtcacatccctgagaaacactggcggctctgccccgagagggccagggtgtccaccgagcctggctgaagccagctgtcccctcccttcttgcagagcaggctcacactgggcctgaaggcccagcacctgcagggcccagcctggggaccaccaatgcccggcctcttccagctcagaagcgcacacggcagccacggggcagcggcaaaggcgatggtacagaggcaaatgcctccccaggcagtgacaggcacgccccccgccccagggcggccactgcccacgccggcctagagctcctcgtagtcgccacccccagggtg

SEQ ID NO: 517 - DNA, 1392 bp, Homo sapiens
caactctgggccttcaagctggactatgacagcatggagcgggaaattgctgagccactgtttgacctgaaagtgggtatggaacagctggtacagaatgccaccttccgctgcatcctggctaccctcctagcggtgggcaacttcctcaatggctcccagagcagcggctttgagctgagctacctggagaaggtgtcagaggtgaaggacacggtgcgtcgacagtcactgctacaccatctctgctccctagtgctccagacccggcctgagtcctctgacctctattcagaaatccctgccctgacccgctgtgccaaggtggactttgaacagctgactgagaacctggggcagctggagcgccggagccgggcagccgaggagagcctgcggagcttggccaagcatgagctggccccagccctgcgtgcccgcctcacccacttcctggaccagtgtgcccgccgtgttgccatgctaaggatagtgcaccgccgtgtctgcaataggttccatgccttcctgctctacctgggctacaccccgcagcggcccgtgaagtgcgcatcatgcagttctgccacacgctgcgggaatttgcgcttgagtatcggacttgccgggaacgagtgctacagcagcagcagaagcaggccacataccgtgagcgcaacaagacccggggacgcatgatcaccgagacagagaagttctcaggtgtggctggggaagcccccagcaacccctctgtcccagtagcagtgagcagcgggccaggccggggagatgctgacagtcatgctagtatgaagagtctgctgaccagcaggcctgaggacaccacacacaatcgccgcagcagaggcatggtccagagcagctccccaatcatgcccacagtggggccctccactgcatccccagaagaacccccaggctccagtttacccagtgatacatcagatgagatcatggaccttctggtgcagtcagtgaccaagagcagtcctcgtgccttagctgctagggaacgcaagcgttcccgcggcaaccgcaagtctttgagaaggacgttgaagagtgggctcggagatgacctggtgcaggcactgggactaagcaagggtcctggcctggaggtgtgaaggtgctgtatcccggaaatctatctggaccctggactgcagtgcaggagatgacagagtgaggagggcccagagcagaattctggccccagaactctgtgcccaggagccatgccttgagcagtattagccgtgtgtgtatgcatgtgagtgtgtgtgtatgtgtgtgtgtgcatgcatatgcatgtgcatgtgtgtgagctgccttgaacgcacggagcaaaataaaattttcttagcc

SEQ ID NO: 518 - DNA, 2613 bp, Homo sapiens
atagatgtctagattataatcataacaaaaatagacaaccagacttttgcctcctgacagaagtactcagcctgacttaggaaataagcctgagtctgattaagcctttagatttaactgaatatgtgtcatggtctaaataagggacagaaaccatacagttatttggaaatggaaagtttcatctaaagaatggtcactaggggagtggagtaggtggattaactaataagaggcaaagatgtataggaatagcagatacatggagagcagtcaccaccaccagcatggaagaaagtgtccaaggaagagaccacccactctcagggctgagagcctagcctgggtggaggctgtgcagctgtggcttactgctgggggtagttggccgaggttctgtgctgcctggaaacccatgctcaggagtactgtggaaggtattcacaggaagatgcaatgacttggaatttactgagtcagcctattctctgggatgggtgggtgacagaggatttgttcaaatggaggtgcttacctggtggcacccttcttcaaagacacctgatggtgggtgtcggtggaaaaccacctatcaatccctactcactgccactctgctgcacagccattgggggctccagggaggtcgtctaaaggcaggtggcagctcctgtgctctattgcaaaacctcctggggatggggttgagttgggggaggctggtgatggtgaagtgccctgctattggcactggttgtggaagctcccaagagggatacactggccgtgtgtgtgtgtgtgtgtgtgtgtgtgtgtgtgtgtgacgtccatgggaaggtgctggttgatgctggcttttcagctcggctgtaaggaactgtatgccatgctgaagcccagagagacaaatacactagaaccagaaagagaagctcttccttctgcttgtctttccactgccttctagtgacaaagccttgtactgggatagctcatcagaggagaaatatttccaagttcaaccccactcttgcagagctggctaggaagaatggatttatatctggaggcaaaaaattgacaacagacacaaactactagcttataagaaattcagggagtagaggaagatatcaaatgatatcattagataaaatcagcaaaatatagtatgtgggataaacaacctagttccttcaacagataaacatcaaggaaaacaacacaaagaaatggaagagaaatctggattaaaagagatttaagagacatatgtgtgggccttctttggattctcatttcaatgaatgaagtataaaaatttttttgtatgtgacaggaaatttgaacattctggatgtttgatattaagcaattattgttcatttttgatgtggtaatagtgtgtctattttttttctaagaactcctttggtaatacatgctgaaatatttacagatgaaatgatacaatgtcttggattttagtaatatgtttattgcctttgtgttgaaaaaactcaaaaaatgtgaaaatcgttttttcttacagggtttaaaagttactactatacaatagcctctacctcagttttgtacagaaatcaatcatgaatgatgacctgtctttaaaataacataattttgaatcttgttcctgagttttgtttataatgaactgttagaaatttatgacaatgataactggcatttactaagacatattattccatggctgtgttcacgcacatattctgacttggtagtttatgatgtgaacaaaagtgtctgtgctttgtgggatagttaatattgtcttatggaaggaaagaaaatcaactatcattttcagcagtcttgttgacatagacatatgttttctacccgcaagcctgaatatgtattcttctgacatgtttactatttctagaaaccatggtattcttaaacatttcagaaatgcaactgctattatatttatcctctgctgatatagtgtttatagcatatactagaattttagattttgagaaaagttcatattaaaacaactacaaattcccaagagacaatattttaggtatcggtgcattttttagtccatgaaaatgtttgaaataagtcttttgtaatttactaatgttcttcagctcttaatgataatttcactcttgtttgtttcatagctgaaaataaaatattagaaatttataaagttcaaatagcatgatataaataataaaattaggtatttacaaatattggtgatatttgtgggtagggggaagggctgagtagaggagaagaggatgcattattaagtttaagatttttcgccaggcgtggtggctcacgcctgtaatcacagcactttgggaggccgaggcaggaagatcatgaggtcaggagtttgagaccagcctgaccaacatggtgaaaccccatctctactaaaaatagaaaaattagctgggcacggtggtgcgtgcctgtaatcctagctactcgggaggctgaggcaggagaatgacttgaacctgggaggcagaggttgcagtgagctgagatcgtgccactgcactccagcctgggtggcggggtgggactccatct

SEQ ID NO: 519 - DNA, 2809 bp, Homo sapiens
gggaaaaatgtcgccatgaaggccgagaaccgctgccgccgccgacccccgccggccctgaacgccatgagcctgggtccccgccgcgcccgctccgctccgactgccgtcgccgccgaggcccccgttgatgccgctgagctcccccaacgccgccgccaccgcctccgacatggacaagaacagcggctccaacagctcctccgcctcttcgggcagcagcaaagggcaacagccgccccgctcctcctcggcggggccagccggcgagtctaaacccaagagcgatggaaagaactccagtggatccaagcgttataatcgcaaacgggaactttactaccccaaaaatgaaagttttaacaaccagtcccgtcgctccagttcacagaaaagcaagacttttaacaagatgcctcctcaaaggggcggcggcagcagcaaactctttagctcttcttttaatggtggaagacgagatgaggtagcagaggctcaacgggcagagtttagccctgcccagttctctggtcctaagaagatcaacctgaaccacttgttgaatttcacttttgaaccccgtggccagacgggtcactttgaaggcagtggacatggtagctggggaaagaggaacaagtggggacataagccttttaacaaggaactctttttacaggccaactgccaatttgtggtgtctgaagaccaagactacacaggtcattttgctgatcctgatacattagttaactgggactttgtggaacaagtgcccatttgtagccatgaagtgccatcttgcccaatatgcctctatccacctactgcagccaagataacccgttgtggacacatcttctgctgggcatgcatactgcactatctttcactgagtgagaagacgtggagtaaatgtcccatctgttacagttctgtgcataagaaggatctcaagagtgttgttgccacagagtcacatcagtatgttgttggtgataccattacgatgcagctgatgaagagggagaaaggggtgttggtggctttgcccaaatccaaatggatgaatgtagaccatcccattcatctaggagatgaacagcacagccagtactccaagttgctgctggcctctaaggagcaggtgctgcaccgggtagttctggaggagaaagtagcactagagcagcagctggcagaggagaagcacactcccgagtcctgctttattgaggcagctatccaggagctcaagactcgggaagaggctctgtcgggattggccggaagcagaagggaggtcactggtgttgtggctgctctggaacaactggtgctgatggctcccttggcgaaggagtctgtttttcaacccaggaagggtgtgctggagtatctgtctgccttcgatgaagaaaccacggaagtttgttctctggacactccttctagacctcttgctctccctctggtagaagaggaggaagcagtgtctgaaccagagcctgaggggttgccagaggcctgtgatgacttggagttagcagatgacaatcttaaagaggggaccatttgcactgagtccagccagcaggaacccatcaccaagtcaggcttcacacgcctcagcagctctccttgttactacttttaccaagcggaagatggacagcatatgttcctgcaccctgtgaatgtgcgctgcctcgtgcgggagtacggcagcctggagaggagccccgagaagatctcagcaactgtggtggagattgctggctactccatgtctgaggatgttcgacagcgtcacagatatctctctcacttgccactcacctgtgagttcagcatctgtgaactggctttgcaacctcctgtggtctctaaggaaaccctagagatgttctcagatgacattgagaagagaaacgtcagcgccaaaagaaggctcgggaggaacgccgccgagagcgcaggattgagatagaggagaacaagaaacagggcaagtacccagaagtccacattcccctcgagaatctacagcagtttcctgccttcaattcttatacctgctcctctgattctgctttgggtcccaccagcaccgagggccatggggccctctccatttctcctctcagcagaagtccaggttcccatgcagactttctgctgacccctctgtcacccactgccagtcagggcagtccctcattctgcgttgggagtctggaagaagactctcccttcccttcctttgcccagatgctgagggttggaaaagcaaaagcagatgtgtggcccaaaactgctccaaagaaagatgagaacagcttagttcctcctgcccctgtggacagcgacggggagagtgataattcagaccgtgttcctgtgcccagttttcaaaattccttcagccaagctattgaagcagccttcatgaaactggacacaccagctacttcagatcccctctctgaagagaaaggaggaaagaaaagaaaaaaacagaaacagaagctcctgttcagcacctcagtcgtccacaccaagtgacactactggcccaggctaccttctccatctggtttttgtttttgtttttttttcccccatgcttttgtttggctgctgtaatttttaagtatttgagtttgaacagattagctctggggggagggggtttccacaatgtgagggggaaccaagaaaattttaaatacagtgtattttccagcttcctgtctttacaccaaaataaagtattgacacaagagatctcttcctgccaccttagaaa

SEQ ID NO: 520 - DNA, 516 bp, Homo sapiens
ccccgtctctgctacagatgcaaaggtcagctgggcatggtggcgcatacctgtggtcccagctactggggaggccggggcaggagaatcgcttgggccctggaggcggaggttgcagtgagccgagatcgtgccactgcactccagcctgggagacagagcaagactccatctcaaaaaaaaaaaaaaaaaatcactagtaagtgccagtggtgactggtaagcttaaaaaagaactatgagtgcatggattggtgtgcttgtgtttcagtccatttcagtcagctccttctagttggctctgaggctgtgtgctatgacaagatgttccaagttcatcatatatattgtttttatcccataactgagcttacagttttctaaggagccttgctatattttagttgaaagcagtatttcaacaccaatctgggcatgctatatgctgttagtgggtaatacatctaaatataaggatacataaagattgtaagtaaaagataaccatgcatatcc

SEQ ID NO: 521 - DNA, 931 bp, Homo sapiens
gtttctcctgccatgtagagtgatggaagagcagaattgtggaggagcagggttgctttgttttgtctttgttgtactcagctggaaagctgtttaaggaaagaatctggtcatatgacctcctttctgcaattggaaatgaacgccacagggaaaagaagatataagacacagaatgctccttgcctggctaaaatggaagaggacaaaggaagcagaatactttctgggcttttggcttttgctaccctcctctggcagacccctgtccaagacgctggctgtgttgtgtgccaggctagagcttgtacctactgtaaaatctgtgtgtgatgtctgttgagttttttggaaaacaaaaaacttatattttaaaatacaaggtattagataataccaagggcagataattccacccttggaaataaaaaagattttcttttcttcagcttgaatgtactgtacagctgtgtttctgcagtaggtctcagctcttaggaacgagaaaaaggaaaacattacccactttgcatttcacttctgttcttttcctgtgagacagatactactatctatcctatttttatgggttaaaaagcacagatcaattgaaaaagaactggaaggataactgctaaactgagaactgttacatccaggcacgttgactcgcgcctgtaatcccaacactttgggaagctgaggccggtggatcacgaggtcgggggatcgaaaccatcctggccaacatggtgaaaccccatctctactaaaaatacaaaaattagctgggtgtggtggcgtgtgccttaatcccagctactcgggaggctgaggcacaagaatcgcttgaacctgggaggcggaggtttcggtgagctgagatcgcaccactgcactccagcctggcaccagagcaagactctgtctc

SEQ ID NO: 522 - DNA, 512 bp, Homo sapiens
atctgcctaaaccagaatcttttgtcagaaaccttaacccaacaaaacaaatcttgagtagctcatgcccggctcttaggaattttgtctgtttaaaaaaaaaaaaaaaaaaaaagtccaacttactttattttatttttttaacctagtcactgtttacaattgtatgctaaagcctgaaatattgtctgtgctgtggtgtatgagcattgccaactttatatttattgcagtgaagaagaaactaaaaatatatggaaatgaggagcatgtccaagctcctaaatccgtgtgggtgcatgtgggagaagtgagttagggcctcttgaaaggaggctttttggagaggggtcccccaggtttcttggtgttcctgcttggggatcactgctgctagctgactggacctccccattggaagtttgtgattttgctttggcaaagtttcattgactagtagaactcattctgttttagtgtatatttcaatataaatgtaaacattttgctct

SEQ ID NO: 523 - DNA, 875 bp, Homo sapiens
aggtgatccacccacctcagcctcccaaagttctgggattacaggagtgagccactgtggcctgccattcccgtgagttttcacaaatgtatgtagtatgtcattgccaccacgatgaaggtcaagagcattccaacaccccataaaattgcctcaggcttctttgtagttaatccctcaccgtcaacttccagaatgtcatagagagaaaaaccacacaatatattgccttttgagtctggtgttcttcactcagcccagtggattctgagacttctgtctgttgtgtggatctgtgagaagagctgctggtttttaatctgttttatccagttaaatgtattctcagcttccgtgtaggcttataaatccttctttataaaagtagtgattcaattttaagcaaaatgaatcttttcttcatgtgaaatttcacggggaattccaagatgtcactggataaaggctgagctgtcttggtgggctggaggatggagaaggtcgtgtgttgtgagtagggcctttctggcttcagcctcatcccctcaggggacctgagctcagctggagaatcaagaatccgggtttggttgtctgttttgtgagtcaagaaaaaaaaccttgcatagcacagtggctcacgcctgtaatcccagcactttgggaggctgaggcgggtggatcgcctggggtcaggagttcgggaccagcctggccagcatggtgaaaccccatctctactaaaaataagaaattaggcctggcacggtggctcacacctgtaatcccagcactttgggaggccaaagtgggcagatcacaaggtcaagagatcgagaccatcctgcccaacatggtgaaaaccggtctctact

SEQ ID NO: 524 - DNA, 542 bp, Homo sapiens
accttttgggcctcagtttccatgtctgtaccacaagagggttgaccagatggccccaggttttcctttaggtctgacatcctgagggtcattcatcccatgcccagttccccccatcctactcctaacagatgtgaccctacttgaggccgccttggcttttgggtcaccctgtctcatcccatcaccccaaacataccctagtccttcagcctggggctctggcatctgagcccgagctcctgcccctgctgtgggaaaggtggggaagaaggggatctccctcccgggcccacccagctgcccagcctttgcccactcggggagcagatcatgcatgccaatccctgttgccgcatggagctcctcagcccactgacctctccgtgcctggtgcaggccaggcccccgtcttccgcctgcctctgcttccccgtcatgcatggtggtggtgtttctacggtgtctggttctgtgcccgtctctgagacagtctctgtgtggaatttgccttaaactgaagtaaatttggttcttttagt

SEQ ID NO: 525 - DNA, 471 bp, Homo sapiens
  misc_feature 195,269,343,429: n=a,c,g, or t
aacagggtctcactgtgttgcccaggctggtcttgaactcctgggctcaagctatcctgggctatcctgggctaccgccttggcctcccaaagcactgagattaggggcatgagttaccgtgtccagcctgggacagtcttaaaccccagggctatagttagatgtgatgcctttcttgtgtaaaatgagagaangatgattatgaaaggggacccttgaaactgagtcctcagatccactggtttttagaaagaatacctgtaaagtnaaatcacaccatgtgatgtctgtatctcaagtctgaagacttgtatttgagattactctggcatgcttagcatncttttgactgactttttcaacctcctaattgtaatagtagtatctccgtgtctttgttctgtttctggtcagaattttgcctgganctgaaaaatattaaagttcaccataacccttccagaaaatat

SEQ ID NO: 526 - DNA, 490 bp, Homo sapiens
cactgaacattcatcagggaactttcctgaagttcagctcaagactaccctacctgctgtgtttgtgagaagagtaggatcacacacacaggtgcaatcttgaccacacttacctgcaagaggagtaaccagaggacacacttccttccttctttggtgtctgaggagtgtgaactgttggggtcagttaagacccaacataactctatcagaagaaaactgttgtttgcctttcaaccttgttttacagttctgcagtgtaatggaggacgggcaacgtgcatgtgcaggctcaccactcccaggcctctgacatgagggacatgtgacagtgtcattcagtattatgttcaaaagacatttttatcctgatcataattaatttgaaaactctttaagttcatgttatacaagatgatttactgtattatacttttccttttttatataatgtctaacaaaaaatacagctgcaacattttgattcctg

SEQ ID NO: 527 - DNA, 622 bp, Homo sapiens
gccattctcctgcctcagcctcccgagaagctgggactacaggcgcctgccaccacgcccggctaatttttttgtatttttttttttagtagagatagggtttctactctagcgttagccaggatggtcttgatctcctgacctcgtgatcctcccgccttggcctcccagagtactgggattacaggcgtgagcactgcgcctggcctaagtttggggtttttaaaaaatctcttaattgatgtgaatacttttcagagatttccttctcttatgtttgtagaacaaaaactagcatggctccctgtattctacttaattttcttgtgttctaccctgcattgctattaagaatttcaggaatgagtagatttgggtcagaactttcgcacaccttccctgcacactgtggtacctctggccagagttattttcttacactgttttgcagtggataaagagtgtgattttgtttgtttgtttgttttgagacagggtctcactctgtctctctactcaaggaggctgaggtgggaggatcccttgagtccaggaatttgagattgcagtgggctgtgatcacactactgcaccccagcctgggtaacgagattgtgtctcc

SEQ ID NO: 528 - DNA, 287 bp, Homo sapiens
gagggtttgatcgccagcgcagcctcgccctgcccagacagctgggccctaaggggatagccagcgcctttagacttatcttaaatcgggcatctgcatcaacacttatttctggggtcctccatggaaagcagctcccgaaacaacacccgcccggtccgccctccgctgcactggaaaaccgcccctggacgtttctgccgcagtgtccccctcacggagttccgtttgtctgcttggtcggttgttctctggagccccaggacccaggccgcttgtatgtgcct

SEQ ID NO: 529 - DNA, 958 bp, Homo sapiens
ctcaaggatctactgtgaaaggtgtgtttgtaggtgatatccaacctaactcagtaacgaagtcgttacttagctcttagctgtgaaataactctggaaacttccccaccccaaccataaattcttacttataaagaaacaggtccccaaactggaaacagcttagtccaggcctcagcgagaaggaaggacaccatgactgctccatgctgggcacagccgggcagtcttgccaagtgcctgctggaggctgtgccggcaagaggcctgcagcaaggagattcccttccctcgggccattatcaatactgtctttatctggaggtggggaagcgcagccctctgagacagcaggacaatggtcagttcagagagggtgagggcagcaaacgcttcagaggacacagaagccagaggacccccccccgccccacagctgggtcagcctggaaaatccatctattagggactttttggcagccagatggcagcaatagcccattaggtctcatcccgagttccaagtcttggctgcaaatgagcctcagttcgccttactggagagcacccccagattcctgggcacagttcatttccagccctttctagatctgatcttttagggggaaagacagcttaaaatgttcttttcattttaaagaaaattattctgtctgcttaagttggaggctacttactctttcacctgacattttctttccttttattcttccagatcaggaatgaaatttccatgctgctcataaagataatattattgtactaattatttttattaccattgtaattatgatcattatgttgatattttagtcagggttttaaatgcacatttattccaagtatctttgtgttttctctttaatatttaaacttattctctctgtgagtatataagtagactggagggacatccagatgtccagttttgtcaggc

SEQ ID NO: 530 - DNA, 1583 bp, Homo sapiens
cttgttagggaagagacctgcttgggccacatgggtctgctgcctgtgccaccacctttcccagaacactggacttctttcctgcccttttctacaactctacgctgtgtcagctgtacagccaccccccaccccttcctttcagcctccatcagggaagagacagtaaaaataatcacagtcaagtgattcaaaacaaaacaaaaagcaactgttaaagccaagtctgccccataactttaaaagccatcattggtcactgccgatgtctatttttgaagggttgagatggacagatttcccaagatgcatatcttttgctttcagttctaacaaatgttctattagctaaaatgtgttgtactccacagagtattgggctcgtaattctttttttttttttgagatggagtttcactcttgttgcccaggctggagtgcaatagtgcaatcttcactcaccacaacctccgccacccgggttcaagcaattctcctgtctcagcctcccgagtagctgggattacaggcatgcgccaccacgaccggctaattttatacttttagtagagatggggcttctccatgttggccaggctggtctcaaactcccaacctcaggtgatccgcctgccttggcttcccaaagtgcggggattacaggcatgagccaccgcgcctggctgggctcgttaattcttatcctagttccagcttagaggaaggcctggaaggagggtagggggaccaaggagaaacttttacccaaagccctattacctccccattcccagtgctgcttatttgtacctcttctgcccactcatttctgttccacctgcccctttacttcttaagcagcatcctcatccttcttcctcttcagctcttatgttgaaactcctgttatctcataatcacgttgaatgtgctcattggttggttgattttttaaagtctagtttaaatccatttaatttcagccctgcaaagactctatccgtgtggttatttggaaatacgataaattagtagttagtatagagggttctcccacttacaaatggagaagagcctgtacatttcatattcacagaaagttttcctgcattcaaagacttgtcactggacccaagccacatgtgtagttggggtcaacatgattatcactggactctgctcgtaaatcctcctctactcttgtctaaaggaattcaagcccacatttaaatcttgtcagcttcatagttgttggctttgctgtggcctacgctccctattttcattcagattctgagccctggataaaatgcagagagtctaaccctctccacccctctgcctctccagcggatgcagtggtgcagtatgacgtggagctgattgcactaatccgagccaactactggctaaagctggtgaagggcattttgcctctggtagggatggccatggtgccagccctcctgggcctcattgggtatcacctatacagaaaggccaatagacccaaagtctccaaaaagaagctcaaggaagagaaacgaaacaagagcaaaaagaaataataaataataaatttt

SEQ ID NO: 531 - DNA, 913 bp, Homo sapiens
aaccatggaaaccccagcgcggcttctcttcctcctgctcctctggctcccagataccaccgcagaaattgtgttgacgcagtctcccggcaccctggctttgtctccaggggaaggagccaccctctcctgtagggccagtcagagtcttggtaacaactacttagcctggtatcgtcagaaacctggccaggctcccgaactcctcatccatggtgtttctaccagggccaccggcatcccagaaaggttcagtggcagtgggtctgggacagacttcactctcaccatcagcagactggaacctgaagactttgcggtatattactgtcaccaatatactagttcatcgttcacttttggccaggggaccaaggtggtcatcaaaagaactgtggctgcaccatctgtcttcatcttcccgccatctgatgagcagttgaaatctggaactgcctctgttgtgtgcctgctgaataacttctatcccagagaggccaaagtacagtggaaggtggataacgccctccaatcgggtaactcccaggagagtgtcacagagcaggacagcaaggacagcacctacagcctcagcagcaccctgacgctgagcaaagcagactacgagaaacacaaagtctacgcctgcgaagtcacccatcagggcctgagctcgcccgtcacaaagagcttcaacaggggagagtgttagagggagaagtgcccccacctgctcctcagttccagcctgaccccctcccatcctttggcctctgaccctttttccacaggggacctacccctattgcggtcctccagctcatctttcacctcacccccctcctcctccttggctttaattatgctaatgttggaggagaatgaataaataaagtgaatctttgcccctgtg

SEQ ID NO: 532 - DNA, 703 bp, Homo sapiens
agcacacatccctcaacatgtccagtagggagctcctgggcgacgggtcctgcaggtggatgtggaccaggagccccgtgggaggaacgtgcccctggggagagctggtggataccccgaatggcaggccacctggggcaaagccagtggaacctgactatggcaggatgagaacaccagtgttttataatgcccacttttttttcacttcttgcagtttctatgtttatttcctgttagcatttagtagtatctttatgagtttatctcagttatgctaggcagaaaggagctcttgtcagttggcaggaccgaaaggagagaataggcagggggaagaggggacagtaatcgaagtaggagcaccttgagcgaagtgaaatgtgggatggaaatggaagctcctgtttgtgatctcccagagaggctcagtccagcgccaggtgccgtgtgcttgtggaataaagagaccgaattccttctgtactgggggttcatgctgaaccccacctttgttgaaggggaggaaccagctgcccaaggcaaactagaagcatgcttgcaggagggaaggttaagacacacagtttatgtgcatagcagtgaaaaccatagtgtctgttctgaagtttgggaaaatagtgtgagactgtctagctgggtctgtcattggctgatgtgtagtatgtgtgggtcgctcact

SEQ ID NO: 533 - DNA, 943 bp, Homo sapiens
tttttttttttgccccaaataagactagaaatggattgctccatttaagacttccattaataaacttctcagaatatgaaatgcctccaaaatgtggggacgctgggttgaaaggtgccggataattctctttggtgcgtgcgctgggtgcaggaggaaatatgctaatgtagccgtttgccgcaggctggtgttatttatacagcgctggctgggcaaggttggcgctggagcaggagaggagggagaggtttgtcttcttgtgtgagagtatagatgtgtgcgcctgtgcacacggcgttccaaacatgaatacaagatcttagggagggggtggggaatgccatcacgtttatactgtgtgtattataacttgtgttggagatatatcccagcatcgtgcttacatcgcatgcacttaggagtgggggaagaaatggcgatttgggagtgggtgcggcgggtcgcaggtggccagacactgcgggggactggcgacctgaaattggcaaaggcgcctccttgaccctgctccacggacacaaaaatcaaccttattcgctcctggaaaaagcgcagagggttgttcccgaaggctgaagaccctcgggcttgggactgggagcggggcgcgggcagcgggaccgccgggcacctctgaagagacagaggtcacggagacctggcgcgcgcggagtgggtggggggcccgcgcggctgcgggagcccagcttaagagaagacccggcccacacgttctcagcgcacgccgactttgccgggaccctcgccggccggcgacccctgtacgcgcgtctcctcctcccccgccccgcccggcgcgaaacgggcaacgggcaggggatcctccagccaggcgggcccggggtgtcccgtttcccccgcccccctcccgtggatcccggagcggcggcggccgccg

SEQ ID NO: 534 - DNA, 520 bp, Homo sapiens
tggtgatctccttctttagctcaaggttgctgcaagctggagctgagctgtcagtggaacgggtcctggaaatcattaagcaaggcgtcgttgcgctgcccaaagacagactgaagaaatttccagaattgaaattcaaatatgtggaagaggagcagcccgaggagttttttatcccctatgtctggtctcttgtctacaactcagcagtcggcctgtactggaatccacaggacatccagctgttcaccatggattccgactgagggcaggatgctctcccacccggacccctccagccaagcagcccttcaagttcttttatttctgggtaacagaagtagacagacaggttacttggtgtatcttctgttaaagaggattgcacgagtgtgttttcctcacacactttgatttggagaattggtgctagttggcaatagataactcagcgtagatagtattgcaaaaaggggaggaaatacacaacaataataaatgtaaaaacctgccttagaaa

SEQ ID NO: 535 - DNA, 325 bp, Homo sapiens
ggggagtcagtctcgaggacctcaggggacagccgaagctcccatgacctaaccctaactgaggagggtgtggggctgggcagccgccagctcctctcagccgggaggtctgcggcctgggcgcccctaacttcatgtggttcttaccggcagtgggtgagtgtgaagcgtctgccatgctgccactggagtgccagtacttgaacaaaaacgccctgacgaccctcgcgggacccctcactcccccggtgaagcattttcagttaaagcggaaacccaagagcgccacgctgcgggcggagctgctgcagaagtgtgagtggcc

SEQ ID NO: 536 - DNA, 690 bp, Homo sapiens
  misc_feature 188,484,654: n=a,c,g, or t
gcgggagtgcatggcagctctgggtcccagacctggcccgacccctctgcttcacctccagctctgctgctcctctactcttgggtcgagatccctttggagccacagcgaggaaccctgtggtcctcaggcaggtgtaccttgagtcagccaggagccctcttttcctgtgtcaaagcctgccctcnggctctgctcacctctggtgaccctccaagatgcccctgccctcagtttcccctcatgatctggcctctgcccccttctctagccacagcctctagtacactttagcaataccaccagactagttagagttccccactcaccaagcaagacatgcagtttcatgcctctgtgccttcgctcatgctgtttcttccgactggaatgccttcccctgctcctcctgccttgtcttgcctggcaagttcatttttcacgatcccctcaaaggccccctcctccaggaaggcaacccctntgcccctcccctccaggttacctctgcactttgtcaatgcttctcttgtggcacttatcacactgtattttacttgtttacatgtttgtctccccttctagactgtgaatccttaagggcatggactgtatcttatgcatctctgtatttctgcgcctagcacgggcctngcacacagtaggcgctcaataaatgttgaatgaatg

SEQ ID NO: 537 - DNA, 803 bp, Homo sapiens
  misc_feature 557,782: n=a,c,g, or t
ctctggccaataagagcgtctgaaactgttctatgtactatgccctgcgatagaaacacagttacctctcccctttcacgtagttttcatttgtggtgagattctctcccaggccacaagacatttcctgctcggaaccttgtttactaatttccactgcttttaaggccctgcactgaaaatgcaagctcaggcgccggtggtcgttgtgacccaacctggagtcggtcccggtccggccccccagaactccaactggcagacaggcatgtgtgactgtttcagcgactgcggagtctgtctctgtggcacattttgtttcccgtgccttgggtgtcaagttgcagctgatatgaatgaatgctgtctgtgtggaacaagcgtcgcaatgaggactctctacaggacccgatatggcatccctggatctatttgtgatgactatatggcaactctttgctgtcctcattgtactctttgccaaatcaagagagatatcaacagaaggagagccatgcgtactttctaaaaactgatggtgaaaagctcttaccgangcaacaaaattcagcagacacctcttcagcttgagttcttcaccatcttttgcaactgaaatatgatggatatgcttaagtacaactgatggcatgaaaaaaatcaaatttttgatttattataaatgaatgttgtccctgaacttagctaaatggtgcaacttagtttctccttgctttcatattatcgaatttcctggcttataaactttttaaattacattngaaatataaaccaaatgaaat

SEQ ID NO: 538 - DNA, 419 bp, Homo sapiens
ccacagtcttctggctggcttgcactccagcccgccccatgcagcgcctctcccacacgctgcggtgcccacccatatcccgcagagtctgccaggtaatcacccgacggtcagtgtgccacgcgcaccgtgtgcctttgccctctccacccctaggtgctttgccgctgccaagggtcttggtgtctttgccttgacgctgttgttgttttggtttgtcctttgaggctgtgctttgtcagtactcagggtgacacgcacttctactcttggggtttcctctggtccccacttggagctgccgccaggtcagcctcagcctgtgtgatcacagggaaagttgcggggggcagggtggtgcgcttttgtgtgcggtggaggagttcctaaccctcggcttgtttttttctcttcagttt

SEQ ID NO: 539 - DNA, 717 bp, Homo sapiens
  misc_feature 146,260,522: n=a,c,g, or t
gacagatcgcgctcgggtctcggcctcctgagtgccggtgactgcgggaggcgacggagtgcttctgggggtgtgagctggggaagttcgtggtcacggatgcgtgtggggttgctgctcagtctgtaacggcaggaaagatgaangggagggctgattttcgagagccgaatgcagaggttccaagaccaattccccacatagggcctgattacattccaacagaggaagaaaggagagtcttcgcagaatgcaatgantgaaagcttctggttcagatctgtgcctttggctgcaacaagtatgttgattactcaaggattaattagtaaaggaatactttcaagtcatcccaaatatggttccatccctaaacttatacttgcttgtatcatgggatactttgctggaaaactttcttatgtgaaaacttgccaagagaaattcaagaaacttgaaaattccccccttggagaagctttacgatcaggacaagcacgacgatcttcaccacctgggcantattatcaaaagtcaaaatatgactcaagtgtgattggtcaatcatcttttgtgacatccccagcagcagacaacatagaaatgcttcctcattatgagccaattccattcagttcttctatgaatgaatctgctcccactggtattactgatcatattgtccaaggacctgatcccaaccttgaagaaagtcct

SEQ ID NO: 540 - DNA, 602 bp, Homo sapiens
cttcaggtgtggtagccggcgccgcgcccatagccggacggggatctgagctggcaggatgaattgtgggggtggcacacagcgaagtaaaccccaacacccgagtgatgaatagccgaggcatctggctggcctacatcatcttggtaggattgctgcatatggttctactcagcatccccttcttcagcattcctgttgttctggaccctgaccaacgtcatccataacctggctacgtatgtcttccttcatacggtgaaagggacaccctttgagactcctgaccaaggaaaggctcggctactgacacactgggagcaaatggactatgggctccagtttacctcttcccgcaagttcctcagcatctctcctattgtgctctatctcctggccagcttctataccaagtatgatgctgcgcacttcctcatcaacacagcctcattgctaagtgtactgctgccgaagttgccccagttccatggggttcgtgtctttggcatcaacaaatactgagggatgggttttgggacagctccatgggcatggggaaggcactgaaacagaggactataaaacatccttctcttattccc

SEQ ID NO: 541 - DNA, 649 bp, Homo sapiens
  misc_feature 103,330,589,612,613: n=a,c,g, or t
atttgacctcagcatctctttttatagtgttcagaggaatgtgtcatttgctaaattgaaagaaagtaaaataatgtgaaataatattacttcaggctttgcntgtatgtttctcggtccttgttttgatattagtgatcttaaaatagacattgaagttagctgaagtttaaatcttttgaactttgtagctaacacataattttgggttttgtaaacctgaagtcactcatttaatcttaaactaataatgttttcttacaacctgagaactattttcattggatggggggaaaaaatggcgggttctgtggtctttgtgtggggaanggcagcgaaaggtggtgggttggtctcgtgtggttgctgggtttatttgtttgtgcttgtgttttgctttttcatatgtttccacgctgtcaactaagtcaatatattctcgactacttcttttttgagacttttttccttttgggttacattttgtcaactgtgtaaaactccaatatggagaccaagcatggtagctcactcgtgtaatcccagcactttgggaggccacggtgggaggatcgctttaacccagganttgggaatgagcctgggagatanngcgaaactatgtctctacaacacatacacgcacacc

SEQ ID NO: 542 - DNA, 545 bp, Homo sapiens
atttgtgactttgatccatcccaagcatggttaagagggagcacgggcaggaaaggcccactttctggggttgggcagccacccctgccccagtttcggctcctgggaatcctccgactggagaaggggaaaggcaaggcagtcctcctggaggcggcttccttgggagcaccagcttccagcggcggggagagaaggagctcctgtgggagagggggcaggatgtgagtaggtcggtgctggctatgcgagcaatcctccctccaagcctgagcaagtcggtacattttcccccgctgcctcattcctgtaccttggttgccctcctcagcctgggtttgcaggaccccctcggctgcagggcgcctgccacaaagccgaccccggcaggagccactctctctgctagttcgctgcctcggccctgctctccctcagcctctcttcttctctcctggcctcttttctggggcatcctgggtggagtgtttttcttgggatcacgagcttgcactcgcacacaggcccgcagacacacaggcccg

SEQ ID NO: 543 - DNA, 754 bp, Homo sapiens
  misc_feature 367,370,371,713: n=a,c,g, or t
atctgttatccacaatgtattttagttattcccacaagtcaggggtccagataaaatgagggttatcagctaactgatatgctatcattgaggttcatcaatgaatttgtacatttctagttccctttggtgaagggaaaaatgatgattttgcaagacctagattttggcttggtttcttgcctccttttttggcagccttcatcttctcatctcccaaaccccctgagcccgtaggttttcatagtggacaaagaacttgtggtcttttaaaactgggactgatacttttttgagagagtatcgtgtcgaaagtgtgatgttctaccactttaccaataactaattttaaatacacattgtccgnccnngatttttggaccaaacagacgctcacagtggaggcttatcaagggttgcattggggaagaagcctctccctctctgtcagcaccagctggtaaaggtgactgtacagatgtgcattttccttttggtataaatggtccacagcactaactggtaaggcttattgtacagtatattgtcagtattcttctggttcagcataccttatagttcatatataacctgtattaattgtatagattgtgcattaaaagctgttaccaagttgtcagaacataagagcgaaaacaaggtcatatgtaatattttgtttgtaagtatcctttgtatcatagcaaaggaanatggttaaaaaaatcaactgtaataaagtaattttagtact

SEQ ID NO: 544 - DNA, 946 bp, Homo sapiens
ggagttggttggccgtgcaagctaatgtgggtcctgtgaccgcggcagctcctcagcggagcgcagactgtcctgccctgcagcatgtgcctaaaggctcaaggggatattcctctggggtggccactcccaccaccctgaccctgtctttctctctggcctgctgctctctcaacatcacatacagcttcagctgcctggaggccagaaggaaagggcagtgcaggggaggcctgagcccgacttagccagccctggctgttgtattaccaaagcagggtccatgtttgctgccttaaccctgtctcctctctgttactcagagggcctcatctcagacaaggcccagcctgctttttctcagccctgactttctaatgggctttcccccctaggtcagtcttgctggatttgtgcttttcttttgtggtttctctggccctgagaatagcatggggcttgtaaacctttgggctagatccctcctttcattgctgttgtctctgctcttccctctcctggctgtggttatttattattagtggtgtggcactgggagctgctcctaaggaagcagggagcaaatcccacctttaccccaccttcctgggaaaggcctccaaagcaaaggatctggaccagtttccctgctgtgctgtggcccaggccagagcctgtgggcaggcaggcagggcatagcgacagtgtgggacctgcccccagcttctgccacgctttatgcccttgcctctctggacgctctgcaccaaccccaggctactgagccaccttccctcctcatgccttccctgagctttggtgcatctcatctggactatgggttgtactgtgaccatcccaacacctcaccctctgtctacaaggaaatgggaggtggagcctcctggctgagaaattgttttgcaaatggatctatttttgtatg

SEQ ID NO: 545 - DNA, 765 bp, Homo sapiens
ggagtggtggcgggcgcctgtagtcccagctgctggggaggctgaggcaggagaatggcgtgaacctggaaggcggagcttgcagtgagccgagatcgcgccactgctcatctatcagttgtaggaggcacagcaggaattcattctagtgttaggaagaatgaggaatttattaaaggacattaggtggcttggagagtctccaggagggcagagatccaggtctggagtctacatagccagaaacaaagcacaaccacaggtgggattgctcgagtagagcagtgcccactgccaggactgggcacagagcatggctggttctgctgggctcagggtgctgcaccctctggttctctccctccagataccaggtgtttctgccactacctttgccagatatgtaccctctaacacctgcttctcttgttggtggcttttggacacaagcctgatgctggtacgtctgactatggggcagagctgagcgtccctacccaagctgcaagggagtgtgggaaaacaagatctggctttttctttggctaggtgtggccttatatggggaggcagtcaaacataggaggtcaaattttgctgggcacccaaaaagaatggcagagcccactacataatacttatatgggctgagcacagtggcacatgcctataatcccagccctttgggaggtcaaggtgggaggatcgcttgagggcaggagttcgggagcagcctgggcagcatagtgagaccccgtctctatt

SEQ ID NO: 546 - DNA, 213 bp, Homo sapiens
  misc_feature 198: n=a,c,g, or t
ctttgtagctggccagagggacgccgcagctgggaccaggcacgcggcccatggggctgggcccctgctggccgccactctccgggctctcctttcaaaaagccacgtcgtgctgctgctggaagccaacagcctccggccagcagccctacccggggctcaacacacaggctgtggctctggacatccggatattanaaggagcgttgctgg

SEQ ID NO: 547 - DNA, 666 bp, Homo sapiens
aggggatttgtcttggtttttgtgtgagggtttttgttttgttttgttttgttttttgagacggagtctcgctctatcaccaggctggagtacagtggagtgatctcggctcactgcaacctctgcctcccgggttcaagcgattctcctgcctcagtctcccgagtaactgggactacaggcacctgccaccacgcccggctaatttttgtatttttagtagagacagggtttctccatgttggtcaggctggtctcaaactcccgacctcaggtgatccgcccgcctcagcctcccaaagtgctgggcttacaggcgtgagccaccacgtccagcccatacatttcaattttaaagggatgcgccctagtccttagttagtctctcctcatctctataaaatgttcagctactcacctcttgggctattgctagacatcgttttctcttccttctttctgacgcctacaatagataggacattccccctcctcattctattctcccaagtactttaaattgcaatttataaagtttctatgctacactctaaaaaaaattctgttttgttttctaatttcataattggtgcttcactgtgtcttgtcctcgaaggaatgagtattttgattgtgttcattaaatctgatttttctatgtcttct

SEQ ID NO: 548 - DNA, 920 bp, Homo sapiens
cgggaggcagaggttgcagtgagccaagattgcaccattacactccagcctgggcaacagagcgagactccatctcaaaaaaaaagaattgaagccccttcttaccacattgacctcatcttacgccattgtcttttctcacttctatgctgtagccacaccagctgtttctattcctgaaaccgggtctctgtaattgctgttccctttgactggagtgcttttcccccatggtcttctcatggctggcgtcttctctgcaggtctttgctgattctacctcttcaaagaggctttcgctggttgtccttactcataacgtagatcccactcctccaccgtcattccctgtatcattaccctgcttcatgtttcccccaagtgttgatgggtgtctgagatctgatgcttatttgtatgtttgcccactgatggcagggacctttcctttctggttcaccatcctattcccagtgcctggaacaaagtttggcctagagtagctgctttatatttgttgaatgagtgaggggcttgaagtgtaattgagcagatgggatgtatacatacgaggtaattaacaatacagatgccaagtgctacagaatgtgaaagaaggaagaaccccttgtgaattggagtcaataaagaagactccatggatgagcgaggaggagcagtattagataaatggagagaaaagaaggaaagacatagtgtgactgggtgaggtttggcacagagttcttgggaatggtctttgttgtgctagagtttatcatccattgctgaggggtgagtgtgtcgtcccctctaggacctttagccagcccagctggtggctgacattggagggctgtgctgtgaaaagtgacactgggttagagcaggagtcacaaacttatagggctccagaagcc

SEQ ID NO: 549 - DNA, 707 bp, Homo sapiens
caattttataattactacgatcatcatcaccatcattatagccaactttcattgagaggcttcccaaacttaacacgtctaaggttaactcttgactctttcccagtcttcaatagctcagtaaatggtacctctgttgaccccaatgcacaggccaacatcctgcaaattatccacctttcttctttttctctcacacttcattccgtccataaatcttggctgttctgtctccagaatagatctccaacccaaccacatcctcgcaggagccccgtgtcgcaccccccctcaggtgcccttcatgttttgatgggtgtgagtgacgctcctggatttatataggacacacgtgagcagctacgtcagtgatgctgcttctcactgcctctaccactgtcccccattcaagacaccactaccggccgggcgcagtggctcatgcctgtaatcccagcactttaggaggccaagacgggcagatcacctgaggtcaggagttcgagaccagcctggccaacatggcgaaaccctgtatctatgaaaagtacaaaaaaattagccaggcatggtggtgcacacctgtaatcccagctactcgggaggctgaggcagaagaatcacttgagcctaggaggcagaggttgcagtgagccgagattgcaccactgcactccagcctgggcaagaaagcgagactctgtctc

SEQ ID NO: 550 - DNA, 715 bp, Homo sapiens
  misc_feature 668: n=a,c,g, or t
ttttttttttttttttttttgccaatgtttattttttaataaagcaataattcaaaacaatttttttttctactcattcaaaaggtcataactcaggagtgctgtttataccagatgaatctacaaagccaagaacaggaatcaccgtatctccttcagtagacctgatactgtgagtcttctcttttctgttgacatatttgtgcaacatgctgtagtactggcccttcggattgaaagtatacagtgatgaaatttgctgccactctatcatgcttggagtgttatattcttttggaggcgagctctcaaagaaacatttaatatttttttttggcaatttagtggcatgttcgggggctttactttttaggttcggcggcgccggttccaaatagatttttcagatttttagcggcagaaaacgaacgggggataggcatcgggggacagatgtaaaattcagaagattgatgataacaactgctatcaagatccagcccaacaccggggactgagccttcagatccctcaggaggtcctgcacgttctatgtcttggtctggttgcacggcaccagcggcagctccggggcgcagcgcggatggcggccgaggcacaggcgctgcgcgaaggccgcgctcccggtggccgcgcactcgtaaaanacgcccccgagcagcgccacggccacccaggtgaggggcgcgggtcg

SEQ ID NO: 551 - DNA, 2163 bp, Homo sapiens
ccaagactttctgaaacaagacagcttaagggaatcagccttttgctttgtgatgtgaaaatactgtgatttgacgagccgcttcctgaggggcaggcccacgtggggaggttgcgccgtgtacatagacctgccgtctgtgtccttggtcaggcccggatgcttggtctacactgggttagaggctgctctccccacgcacccatgtgctcatggcttctgcagaccctctgctgggtacatcggtcccctacggcgaagttcagccagggctctccctcctgagagcatggcgtccccaccttcctgtttcgccgacgtcactacccagggtggcaagtcttgcaggcagagggtgtagcccaagttcagcctctctctgtgtcctccagagaagagggttctttgccctcatcagggccctgcttgtgggttttcggctctggggaggagagtgttggcatcagtgtgtttggcctgatttcttcagggggccaagctcccgggaggacccctagccaggagggccccccatgtccatccatccctcctgctggggcttggatgtcaggcttgggggctgtgagctgggacctcgcctgagcccggtcaggtgggacaggagcctgccagaagcccatggggggccaggccgggtggcttctattttatttttttagagatggggtcttgctgtgttgcccaggctggtctcggactcctgggctcaagcagtcctccctcctcggcctcccaaagttctggggctacaggtgtgagccacttctgcccagcatcccaggcctgaacagccttggcaggacccgtccctagagggggctctggtgcctcccttaggtgggccttgagctggtttttaaccaaacatccttccaaactcgggctgcgacctgcttcctgagttttctgtatttccaaggagccctccgaccagggagaggctggtggagtaaggtccagcggtattcgggggtcctctgtcacctcgccctgaaaacagcagctcccatcaccttcactgggtcccgatggagccgtctcagaggccgaggggccctctgtgtgggggtgggacgcaggggctctcagagcaagggccacaaagccgatggcacagatgtgcccctgggcctggcccgtcacccacatgtggtgccctgggccagggcgtgcgggcgccagagccttccctacacagcctaagagcaggggcaagactcggcccctcactcaccctgggaggcctgcctgggctacatggacacctgggtctctttctacccccattcaccatggaccaggggcctccatttcctgggggctcttgcggcatgtgatttgggggtccctgggacattcccccgtcagctccacctgagccaagtgtcctgttccctgcggcccttggccttccagggtcctggccaggcaggggtcaggcaccccatactcttccgtgtggcacaggtgtccacccacccccactggccacagacaccattctccccctgggagcaggaggtggagtaagttgtacccccaggcctgggtgctggggagttcctgagggcatgggtggggcaggagtgagtgcctcgtgatcccagcctcagtttctctcttgtcactttctcaaacctgcaggtctcagggccccgggctcctcctgggcagcatggggggcaggggctgggccttggggtggtgctggctctgatgattccagagcctgtatccaccttctgggctcctggccagcaccccacccccaggagccagggacaggtggcatgtgttggggtcgggggatggcccccatctcgaagtgttctggaatttgggggcaacccttgcccagcccagccatcaagaacttctgatctcctgcccaccaggaggggacttagccatggacttggccagtaggcctggggagggagggctttggcagccaaagtccactggccctgccgtgcccctgagtaggaaactgtcccctaggggctgggtggccccactgatatatgcaaacccgccggtccgagccctgttcctgcctgtgctcctctgtgcccaggctggctctcccccaaccctagcatgtatactctgccacggacgtcccgtgggccatgattgtgg

SEQ ID NO: 552 - DNA, 1783 bp, Homo sapiens
gtcggacgtctacacccgcagccgtcttctgtctccgcctcaccctcaggcctgacggtccgagtggagctgcgggacagcccgaacctccaggtcagccccgcggccctccatggcgctggtgcgcgcactcgtctgctgcctgctgactgcctggcactgccgctccggcctcgggctgcccgtggcgcccgcatgcggcaggaatcctcctccggcgataggacagttttggcatgtgactgacttacacttagaccctacttaccacatcacagatgaccacacaaaagtgtgtgcttcatctaaaggtgcaaatgcctccaaccctggcccttttggagatgttctgtgtgattctccatatcaacttattttgtcagcatttgattttattaaaaattctggacaagaagcatctttcatgatatggacaggggatagcccacctcatgttcctgtacctgaactctcaacagacactgttataaatgtgatcactaatatgacaaccaccatccagagtctctttccaaatctccaggttttccctgcgctgggtaatcatgactattggccacaggatcaactgcctgtagtcaccagtaaagtgtacaatgcagtagcaaacctctggaaaccatggctagatgaagaagctattagtactttaaggaaaggtggtttttattcacagaaagttacaactaatccaaaccttaggatcatcagtctaaacacaaacttgtactacggcccaaatataatgacactgaacaagactgacccagccaaccagtttgaatggctagaaagtacattgaacaactctcagcagaataaggagaaggtgtatatcatagcacatgttccagtggggtatctgccatcttcacagaacatcacagcaatgagagaatactataatgagaaattgatagatatttttcaaaaatacagtgatgtcattgcaggacaattttatggacacactcacagagacagcattatggttctttcagataaaaaaggaagtccagtaaattctttgtttgtggctcctgctgttacaccagtgaagagtgttttagaaaaacagaccaacaatcctggtatcagactgtttcagtatgatcctcgtgattataaattattggatatgttgcagtattacttgaatctgacagaggcgaatctaaagggagagtccatctggaagctggagtatatcctgacccagacctacgacattgaagatttgcagccggaaagtttatatggattagctaaacaatttacaatcctagacagtaagcagtttataaaatactacaattacttctttgtgagttatgacagcagtgtaacatgtgataagacatgtaaggcctttcagatttgtgcaattatgaatcttgataatatttcctatgcagattgcctcaaacagctttatataaagcacaattactagtatttcacagtttttgctaatagaaaatgctgattctgattctgagatcaatttgtgggaattttacataaatctttgttaattactgagtgggcaagtagacttcctgtctttgctttctttttttttttctttttgatgccttaatgtagatatctttatcattctgaattgtattatatatttaaaatgctcattaatagaatgatggatgtaaattggatgtaaatattcagtttatataattatatctaatttgtacccttgttgaaattgtcatttatacaataaagcgaattctttatctct

SEQ ID NO: 553 - DNA, 1371 bp, Homo sapiens
gggctggggagctgggcggggagcccggggcctgccaggcccgggctgcagccgcgtctgatcgccgagcgcgccgcgtagacctccgctcccccagggggggctgtcggggggctgttaggtgcctggatgacaagtggacagtttaagccggttcctcagatcctaatggagctgccccctgccgagcaacagaggctctttaacgaagccgcagccatcatcaggcacctggagtggacggacgccgtgcagctgactgcgctggtcatgggcagcgaggccctgcagcagcagctgctggccatgctggtgaactacgtcaccaaggagctgcgggccgagatccagtatgatgactaggccgcacctccggggaggtggggggcccctttaaatgactctgtgattctgaagaggtggcttgggagttgggagaagcccagcggatgccccctggggaatctccacatcatcagtgtattactagtaatgtcccgctggagaggccaccgctgtgcagtgtcatgttccagaaattactgatgaagcagcatgtgttggtggcatgtgcactgcctgccatgacagccctctgactggccccccagtgaagagtaaaggcctgcctgccgcaggcttcggaggcgtctgctgagtcctctcacccgcatgggtctggggaagtgatcacgctcagccgacggtctgaccacacttcatcctccccccggggccttctcatcttgggagatgactcctcttcagagcacatgctgcaggactggatcccacccccctgcaggtcctggggtctcagggccttggagcagcccatgctggaatcatgtttacctcctagtgcaaccgtcccctacccagggactgtcgaatggccccacggaggggacgggcggcctgctgagtgaagccacaaataccgagtggacttgaccccggcccccactaggctgcacacctagactcgccctgccagggcctcgctcttcccatctgaaaagtcctggtagttcttgaggtttacttctcaaatgaaatatttttagtaaaaagtacaggtatatctcggagatattgtgggttcagttccagaccacctcggtaaagccaacatcacaataaagcaaggaagcgcattgttttagtttcccagtgcatctaagtcatgtttactgcatattgcagtccactaaatgtgcaatagcattatgtctaacaaatatacaaaccttaatttaaaaatatttactgttcaaaatgctgacacagaaacgcaaagtgagcacatgctgttggaaaatggtgccaaatagacttgcctgatgccaggctgctacaaaccttcaattt

SEQ ID NO: 554 - DNA, 860 bp, Homo sapiens
  misc_feature 812: n=a,c,g, or t
tgatccattaacatggcatatctttccatttatttaggtcatctttaatttttctcaacagcattatgtacttttcagggtacaggttttatatgtcttatcagatttttccctaagtagttcatattttttggtgttattttaaattgttttgtgttatataaatttggtgctattttattgctttcttaattttaatttctaattgttcattgctagtatatagaactataatagcattttgtatgtttatattgtgtcctgcaaccatactaaactaacttttaatagcttttttgtacatccatcagattttctacatagacagtcatattacctgtgaataatgatagttttacttttcctttccaccaccctggataccttttatttcttttccttttctttttcttcttcttcttatttatttattttttttctgtattacactggcttgaacctctagtacgaagtcaaatagaagtggtgagagtgggcatcttattcctttgtttttcatagataacctttagcagttaaggatcttactagtttgttcagcgtttttatctgaggtggatgttgaattttgtcaaatgctttttctgtatctatcaaggtaattatatggtttttagctttagtttgttaatatggtgaattatattgattttttttgttgttgttttaatgttgatggggtctcgctctgttgctcaggctggagtgcagtggtgtggccgtggttttctgtaactttgaactagtgggctgaagggatcctctcgtcttagcttctcaagtagctaggncagtagatgtgtgccgccatgcctggctaatttttaatttttttttcc

SEQ ID NO: 555 - DNA, 982 bp, Homo sapiens
agatcacaccattgcactccagcccgggcaacaagagcaaaacttcgtctcaaaaaaaaaaaaaaaaaaaaaaaggaagcaggtttgccattgtcccagggcttttctgtagagttccatgctctttttttttcctttctctctttcttttttttttttttttttgtttttttgtttttttgagacggggtcttcgctctgtcacccaggctggagtgcagtgttgcaatcacggctcactgcagcctcgatctcctgggctcaggtgatcctcccatctcagcctcccaggtagctaggactacaggcacatgacaccacacctggctaacattctgtacttttttgatgtgctcctttcttttcccttgttttcctccctcctcctcgtccatcctactggctcccaggaggaggaagatgacgactcctccacagcctcagacagtgatgttctcatccgggacaactacgagcgggcagagaagcggcccatcctgtctgtgcgtaagtcttggggttctcgcgggcccgcacttccctccgggccacagggttccctttcttcatggagagggccctggagaggctccccgcagattctggcatttcctgcccctgggttctgaggcaggccctgtggtagactcaaaagagcacagggtttcagtcctgggcacaggcctggcccctgctggcttggccactactcagatttgcagcttggtaagttccttgacctgtgcacctcagtttccccccataccccttcctgttactgagatgattaaatgcctggttccttgcctggtgcaccctggaagctcaagtagatgtcgttctgtggcatctcttcttcctcctgccttgtgccctcatgttcatacatgcccctgccttgctgtctcctccctggtcggctgggttaggctctgacgcctgctctccctttcaccccagcaggagcatctctgaattccct

SEQ ID NO: 556 - DNA, 765 bp, Homo sapiens
aggagttccagaccagcctgggccatgacgaaaccctatctctacaaaaattttttttttaatttataatgagaaaataaatttacatttccttcttaggtctctagaggatccattttttttctgcaaagcatctgtccacaccctcttaccatgcttgtatgccttaaagatctagcttggcctgtcagcagtgtgcttcattgggaatcgatgcagcaccctcctgcctgcaagctgactaaaagccttttccttctccaaagactttgggaccatttgtattcaccagggaaagggtcaaacaactcctgcatcttcttcccctgcttttcttggcacatctactgatactagctcctaatttgggcaagaaaaaagtcaacaactggaggtagagtgtgttgaccctggactcaccctgaaaggtaagggcacaagagatagttgtatttagctgtatcttgttagaaaaatacatttgtgtagccaggcgcggtggctcacgcctgtaatcccagcactttgggaggctgagccgggtggatcacgaggtcaggagttcaggaccaccctggctagcgtggtgaagtcccgtctctacgaaaaatacaaaagattagccgggcgtggtggtgggtgcctgtggtcccggctacttgggagactgaggcaggagaatggcgtgaacccaggaggcggagcttgcagtgagcagagatcacactgcactccagcctgggcgacagagtgagactccgtctc

SEQ ID NO: 557 - DNA, 845 bp, Homo sapiens
cttttcattctgaggtcttggcccccctggccaccgcaaggactctttgcttgtcagggcttgcaaaaaccaaccttcgagaaagaaaagggaactcttcacgttgaatgttgactttgtgtgtatgcgtgtgtgtgtgtgtgtgcacgcgcgcgtgtgcgtgtttacttcatggaattttgttttgtgaaattcccctccaatcgtgtcagaatttacctccatgccccagtcacactgttggttctgcgctctgaacctgggtgtagctcatttgaaggactctcttctgcgtttcctaacagttatttggtggtctcaagagttgaggttgtggagggttgggagaaactgaagttctatacatttccatagagtttacatcctgcagttaaaaggcagggagggctcagcccgtgccccacagctccaggccatcccctacgggctgcccacagtgcccccttttctctagccgaatctttttcgaacagcccgggaaaggaaaacggattcacttgctgattttgttcacggcggaagcaccttgttccgttcctttttcaggttcagtttgttgtgtaaatggcggttttttctggtgtgagctttggtgatggtggcagggctcctttgaagagatggttccacctcgtggtctgaagaacaaaccagagaagagtcttggtttgccagaggccccctccggcccacgtcaccctgagttcacccctctgattgctctgctgtcaagaagcacgtttccaccagctgtattcaacactacaatgcattttttaaactatatttgcatccaagacaataaagacaccttattttttttg

SEQ ID NO: 558 - DNA, 415 bp, Homo sapiens
agatagggttgggacagggtgctttggaatgaaagagtgaccttagagggctccttgggcctcaggaatgctcctgctgctgtgaagatgagaaggtgctcttactcagttaatgatgagtgactatatttaccaaagcccctacctgctgctgggtcccttgtagcacaggagactggggctaagggcccctcccagggaagggacaccatcaggcctctcgctgaggcagtagcatagaggatccatttctacctgcatttcccagaggactagcaggaggcagccttgagaaatgcaggtagaaatggatcctctccccaacctctcctctaacccactagagattgcctgtgtcctgcctcttgcctcttgtagaatgcagctctggccctcaataaatgcttcctgcatt

SEQ ID NO: 559 - DNA, 722 bp, Homo sapiens
gctgaatctaaaggttggtaaattttattatatgtgaatcatctctcaacaaagtactgttaaaaaaggaaaagctcccagaggcaaagggtggcttgctttacctgccaacttggctgagacgctcctgctttggggatgctcctggctttcatgcttgtctttccaaacagtcggaagaggacattaatgttgcagctcttggcaagcagcagcctgagaatatctcgaaccccttgtatgagagcacaacctcagctcccccagaaccttcctacgaccccttcacggactctgaagaacggcagcttgagggcaatgaccccttgaggacactgtgagggcctggacgggagatgccagccatcactcactgccacctgggccatcaactgtgaattctcagcaccagttgccttttaggaacgtaaagtcctttaagcactcagaagccatacctcatctctctggctgatctgggggttgtttctgtgggtgagagatgtgttgctgtgcccacccagtacagcttcctcctctgaccctttggctcttcttcctttgtactcttcagctggcacctgctccattctgccctacatgatgggtaactgtgatctttcttccctgttagattgtaagcctccgtctttgtatcccagccccctagcccagtgcctgacacaggaactgtgcacaataaaggtttatggaacagaaac

SEQ ID NO: 560 - DNA, 981 bp, Homo sapiens
cccgattctacctcccaaggtgctgggattacaggcctgagccaccgcgcctggtcaaaaagggggtggttctaactttcatcttagggtagctgtgaaaatgaaaggagatgatacatccacagcacttggcacagggcttggcatacagtacatgctcaataaagggagctgttgccacctcttgtggtccctgctagggagggtgaggccttggcgtggaaagtgagaacagagctggtccctactgaggtggacactcttcttgctccctgggagggcaccgcgggcccagggcaggcgctgagtcgcgtgtgctcctctctgattgctgcgcaggtcggccggctggcggagctgggcgcggcgtcaggacgggccaccaggccgggctaggaaggtgtagtgggcctcagcgccgccaagggcggtcccggctcctgtaaccgttgcagtcttctgtcccttcacccaggtgggcaaacgcagaggcgggaacaaactagccctcaagacgggaatagtagccaagaagcagaagacggaggatgaggtattaacaagtaaaggtgacgcgtgggccaagtacatggcagaagtgaaaaagtacaaagctcaccagtgcggtgacgatgataaaactcggcccctggtgaaatgacgcccctcccccacctgcccatggcctgggactctctgcgatgtacataactatttaatgcagcggcagcggcgacagccttccctgagaggacttaaaagcagaaggaaaccgagatgcttcccgcagccgtggacgattctccaggactctttttttaccttgagcacttgcctcgtgagacttcatagaacagtggtttactgtcccccccttctcacctcctcattctctctggctctttctgtcttcctcttctcaccctcctccctccccttagccatcacttctgggaagtaaagaacttgacttagtgccgg

SEQ ID NO: 561 - DNA, 826 bp, Homo sapiens
  misc_feature 589,681,785,788,790,810,815: n=a,c,g, or t
cataactgcataaaattttagaaatttgtcaagtcaaacctttttacttaaaaggcaaacaatagactggaaactatatttacaatacatatcaagagatttttttaaccgtaaggactttttcttattaataagattaagaccaagaactcagtagtcaaggagactaagtaggaacaagcaatttttttagaaaaatacaatacttttaaacaatctgaaaagatgttcaatttctcagtaatcagggaaatataaattaattcaagataccatctaacacatcagagtggcaaaaattaaaataccttgtgaaaagtgttgataaggatacataaaatgggaattatactatttgcagaagtataaaaagctatgtctcctttggagagcaatttggcaaaatctacaaggttataatgtgtatattctgtcccagcagtgccatttgcagttatataaaactcttttatatttgcttatggagtcaagaatattcattgcagtacttatttggattattgaaaaactgttcggagactgggcgtggtggctcatgcctgtactcttgacactttggaaggctgangtgggaggattgcttgagcccaggagttggagaccaacactgacaatatagtgagaccctgtctctacaaaaaaattaaaagtagccaggcncagtgttgtgcatctgtagtcctagcgactcaggaggctgaggtgggagaattgcttgagcccaggaggtcaaggctgcagtgatctatgatctcatcactgcnctncngcctgggcaacagagcaatnccctntctcaaaaaag

SEQ ID NO: 562 - DNA, 735 bp, Homo sapiens
tttttttactcataacagatttttgttgttgtttttaaagaaaagctaacatttgagtagtgactgcgccaagcagtcaagcacagcccctcgggctcgatccccataaccactctagggttaggtattacccacgtttaaggaacaaaaatcgagggaaaaatcttatacaactactagtaagtagtcattccattttagcagagcgaatgagcgaatccacggaaggccggggagcgacgtgagtggcgagaagcttggagtcgccagggacggcgggcggagctgggcgccggggctaatgggcggagctctccagggacagctggccccgcccaggccagcgcggggccccgctggggagtgtggagtccccttgccccaccctcgcccacgtcacccgactggcaaacctttcagctgtcacaggctgcggagagacaatccgtaccctcagtgggttccctttcagtgggttcctttgtccccaggcccattattccgtcctcccctcttccctgatgtattttggcgcggtctcctggctctgcgggcccagggctccggatgaggtctcccgccgtcccgacccccgcaaggggccagcttggtgtcgccttcgttcttctgccaccccattcggtaggggctcccgttcccgccacgccccctgaagttgtgctcgcgcgtcttcccaggactcccccgcgccggagaggcccgcaggaccgccga

SEQ ID NO: 563 - DNA, 626 bp, Homo sapiens
aagttggcttcagctgaagagctgttttgtgaagcatcccaggcttgcccaggagagacatttgccactatgtcaccttatctgggcttgccctggggcactgagacagttgtttggcagccccagcccagccaggggctcatccttctcagctcttgtccctgggaggcctctgcttgtcacttcccagagattgcagagctcttccgccctctctggatgagggaacagaagtggaggaaacaaaagaagcagcagcacgcacagtcctgtcgctgggtgcggagacagcctggcaaagtcccactcagccatggcctgatgcaggccccaggccctcctttcttgggtgtcaaatgactgtgtcctggacatctgatgcaccacctgccctgcctgttgcaaacgtgatgctcccggatggagtggagaaactaggagactgggacaaagcaaaaggctgcaaacaacccagaagcccatcctcagaagactggagaaatgattgaggaatgcatgggcaccgtggccctgtgctccatcacaaacacctctcagaaacaacgtgggatgaaaaagcaagacagttcatacagtatgatgccatttttataaagctcaaaacc

SEQ ID NO: 564 - DNA, 946 bp, Homo sapiens
agaaaagtggaggtctagaggagggggtggtcaactcaccactgggcaggggcaggttaggaaggatttgcgagaggaaaagctcaaatggtgtttgatggatgatgacagtttgggggtgtgtggttgtggaacttgctggcagagggaatgactaagcaaaggtatgggagggtgaatggtgtggcctgttcagggaaccctaaaccaggcagacaggctggaacccacagtgtgaggggatgaagtcttgcccatcattgaagaagggtggccatgcctgctgcatttggaaacactggtcacttcttggaatgcactcctcccctggtttggagtgcactcccctcaatggagcagctcctacctctctggatgcttcccctctgttgtttgtacgagattgtctttctctgcccactctttaataccagtgttcctcagggttccctccacggtttttctcactctagactcctctctaggaatttttccacagcagcgataccccaaatgacatatctcatccagatgagctctatcctgaactccagatgtgtacatggatccagctagtggacatctctacctgataggagtggccatctgctccctaaactttcatgcattctctacttcccatgcttatggaaagcattcatggccgggcgcggtggctcgcgcctgtaatcccagcatgttgggaggccgaggtgagtggatcacctgaggtcaggagtttgagaccaccctggccagcgtggtgaagcctcgtctctactaaaaatacaaaaaaattggctgggtgtggtggcgggtgcctgcgatcccagctgctcgggaggctgaggcaggagggtcactggaacctgggaggcggaggttgcagagagatgagatcgtgccattgcactccagcctgggcgataaagcgggactccatcac

SEQ ID NO: 565 - DNA, 495 bp, Homo sapiens
atctttacaacaaatgttgcattaacatataacttttttcagttgactttaccaaaattaagcccatctttagtagatactgttttaacatgtgaaagaaatacgttataaacataccacaagatatggctataaaacaatgagatcagtatccatttttgctttaaagaattggccttattgcttcagtgtcacatctcatactcaagggcatttactacaaagaaagagttctccaatattgctgttctgttgctgcctgccctatttacacatgtacctgctacttaaataggaaagcctttcaattcatggacaatacaccttggtggtaaccaggcttttatttttatttttttttcttagtgtaaaaactgtactgttttggaaatgtgctgtgaaatattaggtttaactgtgtagatcctagaataaggggatttatatagatgaagttgtaaccaagaaactggttattaaaaatttatttactcc

SEQ ID NO: 566 - DNA, 302 bp, Homo sapiens
cggagcttgcgcagaagacccccatcagggtgcggggtgcagttgcggctccagggccatggcggaggagcagggccgggaacgggactcggttcccaagccgtcggtgctgttcctccacccagacctgggcgtgggcggcgctgagcggctggtgttggacgcggcgctggcgctgcaggcgcgcgggtgtagcgtgaagatctggacagcgcactacgacccgggccactgtttcgccgagagccgcgagctaccggtgcgctgtgccggggactggctgccgcgaggcctgggctggg

SEQ ID NO: 567 - DNA, 580 bp, Homo sapiens
agctgtttcatgaaagaatcaagattataacctggatattctgactcctggcccagtgctttttcttactttgtagctacactttgaagtaagattcaaactgttatccactcaattgccttattcctgaggatgtagtgaaggaagaaaaagttttctggaattccgtaaattatattttaagcttatttcttcaaaattattttcatatatcacagatatatcattggaagatataatttgcatatatgttcattatcagtgttcctaatttggtattacatgtattctatttttttctgaatgatagcatgaaaagtgtcaaagtggtttgtccgctagcgtctgtctgcagaactttcaggatgactattaattcctctcagatgtcatttttgagtggtccaagcctgctgttttgaacccacagcagtggagatttgtattcttatttacagttgtgtactataaagtgtgtgttacataggttttgtgtaataattatttgtaaatattatttagatttgtatttagacatgatttatatctaatatagatacaaagtctgtgtctaaatatt

SEQ ID NO: 568 - DNA, 587 bp, Homo sapiens
gtctcagggtaaccatctctgcttattcctctgccacgtctttcccttctcctctctgctctcataaagaagaatgggagatgaaagtggaggggcagctgaggtggggcggcatcaggctgatacaacaccccagggaaccctgcttccatgtaaccctgaccttaaatccctatcctataataaagagttgggcacaacagaagggaaaaggaagtattctgcaaattgttttccataacagtgcagaggacacactttgcaatgtgtaatttgtgcggtatgacatgcatttgggtgtgtctggtcaggtacatcatgtggtgtccctgttatgcattttgcagactgacactctgcttaaccagtccttccgtgctgtgctgttttgtaagctcttaaccagaatgcaaaaatgttaaataactgtctggttttattttccagccctctgggatgagtctgatgacagtaactcagaaattgaggctgctttacgccccagaaaccataacaccgatgattctgatgatttttatgactaacgtgctgtgacattggtttcaaataaagtctttaaacaaact

SEQ ID NO: 569 - DNA, 1788 bp, Homo sapiens
cacaggcgcgtgccaccacacccacctaatgtttgcatttttagtaaagacggggtttcaccatgttggccaggatggtctcgatctcttgacttcgtgatctgcccacctcggcctcccaaagtgctgagattacaggtgtgagccaccacgcccggccgaggccattttcttctacctccaatagatacatttagaatctgtctcttttacttcatttcccacagctaacagtccattccaggccaccatcacaccatcatcttttgcctgaagtgcataagcctccaacttggtccctaaacttctctacccagtgagctctacacaaaccagaccatgctccctccccattaaggcccctcacagcttcccagtgcattctgacagtgctctctgcacctcttcgccctgtcccacaatgcatgagctctcttattcttttttttatgagacagggtctcactctgttgcccagcccagattgtagtggtgcaatcatagctcacaacagccttgacatcctgggctcaagcgatacccccatctcagcctcctgagtagctgggactacaggcatgcgctaccacgcttggctaattttttgtattgtttggagaggggtttccctgtgttgcccaggctggtcttaaactcctgggctcaagtgatccacccacctcaggctcccaaagtgctgggattagaagtgtgattcatgcctggcgttttgttttgttttgttttgttttttttgagacaggatctcactctgttacccaggctggagtgcagcactatgattatagctcactgcagcctccaactcctgggctcaagtgatcctcctgtagctgtagtctcccaagtagctgggactacaggcacatgctaccatgcccagctaatttttaattttttttttatagagataggggtgtgcctgtgttgcctaggctggtctcaaaaaattcctgggctcaagcagttctcccacctcaccctcccaaagtgctgggattataggtgtgaaccacggcactgggcctgccttattcttccttaaatttctcaagtaagccatcctttttcctacctcaaagtcttgcatttgcagtttccttggcctggaatgctgtttccttcctactggcttcattcttcaaatctcaacttaaatgtcacctccacagagaaccttatctgattaaaaggagttggatcccccacgaccaccactattctctatccaatgtcttttcttattagcatttatcataatatgcaattattctgtttgttttgttgttcctcaagtgtttcttctattagaatgtaagctccctgaaggcaaaaaccacatctatcttgttcctgtagttccaatgcatagaacacaaattctccgattctggtggctaatagagtagggactcagtaaacattttaaaaataaaataaatgtactcaactataccaaaagatttattaagcaaaaaaggtaagatacaaaacagtatgtagtgtggaattccatttatattttgtaaaaattttgtgcagacacacacacacacgtgcatgcacattaaggatacacaaaaaactagtaactgtggttgcccctaggatagggactatgactcaagggagagaagatagaagtaattttaattttataatcattgttcctatttggatttttgttttactacatgtctatatttcttttataataataaaaacaccatctagtactgttattttaaaaaggaaatatggaatacc

SEQ ID NO: 570 - DNA, 3772 bp, Homo sapiens
tccctgtctcagtaacctcaggtgtcccacaccttttggcctcccagtgactccctccaccccccattccatttcgaagatctccatgtctctttgcctggaggttttctgcgttacttacccctgctgtaggaataggtcagtctgccttctgggaccccaggtgctgtggccctcctacctctctgttttttgttttttgttttttttttgcaagatgtagattagaacttgccaaattgttcttggaagagagtcagaggcagagtacaagctgtagggagcggtgtgaggggagtgccaggcgaagcacactccaaggtcaccgggctgttggccccttcctctggggaggagggccttaccttgcttggaatcatgggcttggcggagaggctgggcaaagcaggggtgggagagcactccagctctgtctggttcaccccaccttgttcctggctgctctgcctcaccctgggcccagcgagagaaaggtcaggtgtgtttgcctgagccaggggaggagctttggaaaaacctgtctccaggccacagagaaggaatggccacctctctccattagtgtgatttattgctgtcacagctgagctccaggggggcagactcagccggctcaagccaaccagctgttgatctgatggggccagcccagccccgggcctggttgcacaacagtggggcacctgccaaggcaatgatggcagagcaggtgatgctgtgatcgcatgtcctgaaggacctggatggcagggactggagggggtgggcccccctgcactatccagaagaacggtttcctacctctgagctgggcttggaggcagtctggtagagcctgaggctcagaacatccccgaggtcccttctgctctaacagtgtgagcttggaaagaccccagcctctctgtcagtttccttttctgaataatcaagtccttcctagctttggggtaagctgggcctcctgctcactgtgtaaccctggaaaagccacttaagcctcagtttcatcacctataaaataaatgcatcaagatgttttctgttatctcacagggtcaaagtgatacaatggacatcgaagcaccgtgacaattctccatgtagccattatgctataaatgttggcatcactatccatttccttgtctcctcattctctgatggccgggttcctcttgtctctgttagacttgggttcatgttctgacctgtttgcagaccacctgcagtgtcctctgtaaaatgggcatctcacagcctgcctggctgaattgttgggaggctctaagcagctctttggaaccactgagaccctggaatagggtggaattgctgccaagtgtggagagtgggcaccaggctcagtgcaggtacaaacgtttaacagcttacccgacctgaggcctcaaggaggccagggacttggcaatctgtgctataaatgaagagaatggtgacacggccacatgctggccattcaagccatgtcagtggcatccggaaggtggtggagggaaggtaagagtaaccaggggtgggcttgctccgcgaggtcttcccggaggtggcgagcctctcccagaggtgagagggagtttggttactgggaggagaaaaccaagaaaagctggagaggaatgggctctgttgtggttcaagcctggatgtgagttctgagaacagtcaagaatgcatttctctccaaggcattcactgtgggggaggtgggtcaaatgggtttgcccttgtcaccagctggtgaccttgactctcagagtacattgccctttggcagttctcagaacctctgtgcaccatggctcaggccttcttgaagccaacacttaaggaatggaccctctggggcccacctccttccagccctgccttataagaccccagggacctggcacctgcaaccatagcaggaggcaggagccagcgttcctcaggattcaggacctctgagtgggacaaatggggcttgggaactgccactttccctgcccagtggccatacgggttatgcagctgaggactgacttgggcctggggtcatggctttctaggtgcttctggcttctgcttcattggagcccctttccagctgcaagccaacaccaggaggaactgatctggggacctggagttcaaggctgtaaactcccacaaaggccagagctggcggagctggagaaccccattctgggaagctggtggtgagggcctctgcctttgatcaccaggaaaacagagtgtgaagagggggagtgccactctccatccaggccccaggcaagcagcacctccctgctctcctgcactcctggacacaaccagcagctcctgccatggacaggtggtacctgggcggcagccccaagggggacgtggacccgttctactatgactatgagaccgttcgcaatgggggcctgatcttcgctggactggccttcatcgtggggctcctcatcctcctcagcagaagattccgctgtgggggcaataagaagcgcaggcaaatcaatgaagatgagccgtaacagcagtttccataccttccaccccactgctccccagagagaaatgtgacaatgagcttcagctctgtcgaatccggactacatggaacctctctgggttggcttctcaaccgatttcagagttgtgagctgagaaagaacagcaggagagaggccacagttattcaggggactcctgccttgctgggggcgtccacagcccctgaccaaccatcctggtgtcactgctgagacagcagcctgaacaagggcaatgggaccccagagactgcatctgtacagtcggagccccagggctttagaccctttgctccagtgatcttagagccataatattatcatccaaaatgatgagagagtaagtggcaagcatacctagacatcttctgagcccagcagacagaattttggtttaaggagaacctgggtagtataatgacacataatatttttttatatataggcatcacagtctatgaattgtactgattcatctcatctcaagaagatggtattttagatgtatgtgtacatatttgaagccaaaactgtttattttgtgtaattttttgtgcctattagtttctgaatatctgtgcataaaagcttctgtttctctgcctgcacacatttgtgggtacacactatacacctatgtggggtaggaggggggaatgggcatatttgtttgcatttaccttgtgtttggtcctaggaagggatcttggtgatcattccagcccagctctttcacctcaatggtgaagaaactgaggtccagaaaggcaaggtgacttgtcacaggtaacacagctggctatggagacagaggtgacacaagaacctaggatttctgatttgtagatgagaactctttctataatattaaaatcaattataaattttggggagggaagcagggagatccttgttttttcctcccccaactgataagtaagtactaagaaggtcaatcttgaattagctatataataccaaaagttaagtttttcacacagacctggttcagtattgattccttttatgaaaaccctgtttatactcaagttgtcaaagaattccagagggcatatgaagccattgttaaaataattatatgcctttgtttttgaagaaaagtatccaaaatatataagcttattgtttgagttaaacaaaaaaaacatctgctgtttctcagc

SEQ ID NO: 571 - DNA, 1617 bp, Homo sapiens
tgccttagccctggattccaaggcatttccacttggtgatcagcactgaacacagaggactcaccatgaagttggggctgtgctgggttttccttgttgctattttagaaggtgcccagtgtgaggtgttgttggtggagtcagggggaggcttggtacagcctggagggtccctgagactctcctgtgaagcctctggattcaccttcagtagttatgaaatgaattgggtccgccaggctccagggaaggggctggagtgggtttcatacatcagtcagactggtcttgtcatccactacgcagactctgtgaagggccgattcaccatttccagagacaacgccaagaactcagtgtatctgcaaatgcacagcctgagagccgacgacacggctgtgtacttctgtgcgagatacccgttagcagctgctggaacttttgaacactggggccagggaaccccggtcaccgtctcctcagcctccaccaagggcccatcggtcttccccctggcaccctcctccaagagcacctctgggggcacagcggccctgggctgcctggtcaaggactacttccccgaaccggtgacggtgtcgtggaactcaggcgccctgaccagcggcgtgcacaccttcccggctgtcctacagtcctcaggactctactccctcagcagcgtggtgaccgtgccctccagcagcttgggcacccagacctacatctgcaacgtgaatcacaagcccagcaacaccaaggtggacaagagagttgagcccaaatcttgtgacaaaactcacacatgcccaccgtgcccagcacctgaactcctggggggaccgtcagtcttcctcttccccccaaaacccaaggacaccctcatgatctcccggacccctgaggtcacatgcgtggtggtggacgtgagccacgaagaccctgaggtcaagttcaactggtacgtggacggcgtggaggtgcataatgccaagacaaagccgcgggaggagcagtacaacagcacgtaccgtgtggtcagcgtcctcaccgtcctgcaccaggactggctgaatggcaaggagtacaagtgcaaggtctccaacaaagccctcccagcccccatcgagaaaaccatctccaaagccaaagggcagccccgagaaccacaggtgtacaccctgcccccatcccgggaggagatgaccaagaaccaggtcagcctgacctgcctggtcaaaggcttctatcccagcgacatcgccgtggagtgggagagcaatgggcagccggagaacaactacaagaccacgcctcccgtgctggactccgacggctccttcttcctctatagcaagctcaccgtggacaagagcaggtggcagcaggggaacgtcttctcatgctccgtgatgcatgaggctctgcacaaccactacacgcagaagagcctctccctgtccccgggtaaatgagtgcgacggccggcaagcccccgctccccgggctctcgcggtcgcacgaggatgcttggcacgtaccccgtctacatacttcccaggcacccagcatggaaataaagcacccaccactgccctgggaaaaaaaaaaaaagag

SEQ ID NO: 572 - DNA, 1616 bp, Homo sapiens
  misc_feature 1326,1377,1440,1579,1580: n=a,c,g, or t
gccccagccgtgagattcccaggagtttccacttggtgatcagcactgaacacagaccaccaaccatggagtttgggcttagctgggttttccttgttgctattttaaaaggtgtccaatgtgaggtgcagctggtggagtctgggggaggcctgatacaaccagggcggtccctgagactctcctgcagaggttctggattcccgtttggtgattatggtgtgagctgggtccgccaggctccagggaaggggctggagtgggtagggtcaatgagaaccgaggcttatggtgggacaagaaattacgccgcgtctgtgacgggcagattcaccatctcaagagatgattccaaagccatcgcctatctgcagatgagcagcctgaaaaccgaggacacaggcctttatcactgtagtaaacattactatgatgatactggttatcacgaatacttccaacactggggcgagggcaccctggtcatcgtctcctcagcctccaccaagggcccatcggtcttccccctggcaccctcctccaagagcacctctgggggcacagcggccctgggctgcctggtcaaggactacttccccgaaccggtgacggtgtcgtggaactcaggcgccctgaccagcggcgtgcacaccttcccggctgtcctacagtcctcaggactctactccctcagcagcgtggtgaccgtgccctccagcagcttgggcacccagacctacatctgcaacgtgaatcacaagcccagcaacaccaaggtggacaagagagttgagcccaaatcttgtgacaaaactcacacatgcccaccgtgcccagcacctgaactcctggggggaccgtcagtcttcctcttccccccaaaacccaaggacaccctcatgatctcccggacccctgaggtcacatgcgtggtggtggacgtgagccacgaagaccctgaggtcaagttcaactggtacgtggacggcgtggaggtgcataatgccaagacaaagccgcgggaggagcagtacaacagcacgtaccgtgtggtcagcgtcctcaccgtcctgcaccaggactggctgaatggcaaggagtacaagtgcaaggtctccaacaaagccctcccagcccccatcgagaaaaccatctccaaagccaaagggcagccccgagaaccacaggtgtacaccctgcccccatcccgggaggagatgaccaagaaccaggtcagcctgacctgcctggtcaaaggcttctatcccagcgacatcgccgtggagtgggagagcaatgggcagccggagaacaactacaagaccncgcctcccgtgctggactccgacggctccttcttcctctatagcaagctcnccgtggacaagagcaggtggcagcaggggaacgtcttctcatgctccgtgatgcatgaggctntgttcaaccactacacgcagaagagcctctccctgtccccgggtaaatgagtgcgacggccggcaagcccccgctccccgggctctcgcggtcgcacgaggatgcttggcacgtaccccgtctacatacttcccaggcnnccagcatggaaataaagcacccaccactgccctggg

SEQ ID NO: 573 - DNA, 1463 bp, Homo sapiens
tctctactaaaaatacaaaaaaaaaaaattagccgggtgtggtgttgtgtgcctgtaatcccagctaattggaaggctgaagcaggagaatcacttgaacccaggaggtggaggttgcagtgagctgagatggcgccactgcactccagcctgggcaacagagtgagactccgtatcccaaaaaaaaaaaaaaagtcattgaattaaaatgtatttttgttttatttgaatgacattcttgcagaaagtaagtttcattttctattattttccctaccagggacccagatggaaggatgctcttagatatttttgatgaaaatcttcaccctctttcgaaatccgaagtgccaccagattatgacaaacacaacccagagcagaagcagatttaccggttcgttcggacactgttcagtgctgctcagctgacggctgaatgtgccatcgtcaccctggtgtaccttgaaagacttttaacatacgcagagatagatatctgtccggccaactggaagcggattgttttaggggcgatcctgctggcctccaaggtgtgggatgaccaggctgtatggaatgtggattactgccagatcctgaaagacatcacggtggaggacatgaacgagctagagcgacagtttcttgaattgctgcagttcaacatcaatgttccttccagtgtctatgccaagtattattttgatcttcgttctctggcagaagcgaacaacctgagctttcccttggagcccctgagcagggagagggctcacaagcttgaggccatctctcgcctctgcgaggacaagtacaaggacctaagaagatccgcgaggaagcgctcagccagtgcagacaacctgactctgccccggtggtccccagccatcatctcttaactacggaggcccgccggaggccacaccatcccttagtttctcctttagtttgagaaaagacagacttggggtgggtttgtttttgttttttctttccttttctttttttacgcatagctccgtcaagctgcctggatgagcgcccatgcagcaaggcttggaggaagcgtcagtgccctggagatcccagctcgctctccccactgtcagcaacagcacttccttcgtggaggaagtggactcgaatcctggaggaggaaataaagggaaagggaagtcgtggagaggcagggaaaatggttaagcagcccggccctctggagtccccatgggggcggtagctgaagttggcgagcgcagcggtggatgcagagctggctgcacccagggctgggccagtgtgtcctgtaagactttttgcattccttctgctgcttttttgggaatgggggtatttttgttcatttgtttttgccctgttttgattttggtcccacagagcaggggatgtagtttgtacccaccatggcgcagacttccaaataaatagtactggcc

SEQ ID NO: 574 - DNA, 2037 bp, Homo sapiens
  misc_feature 2036: n=a,c,g, or t
gtgatgtaatccaccctgggggcaatagccatattgccaatggtattgagccttcctgtgctggttcccccactttcccaactctttgggctttgctgctgtcagtgctttccagtctcagcatggtttggagctgaagctttgggctgggataggccagattataagggagggacttccaaacctgatgttctcagacaacgggccgcttcaaccctgccttttcctttggggcacctcaacaaagggttacagtatcctcccttacctaccagcttgacttgttcctctcatctccctggcatcaacttctaatgccctggtaatgtggagacacactgaactacccccagtctatgtttgacagttgggtggtgtcctgctccttagggcaggattggaggcgacccagccagccacccaaggaagatactaatgaagcccctgctttttgcctcaccttttcaggatcccaactcaccagaggcagtttgtgttgagaacatgacaaagcctcatgacaaaatgaatgggggtggggccaaggaactgcatgaagaaaccagaaggttgtgtggaagtaagagaaaggatagcagcctagggctttaggaccggctggaaaccaagttgagtgtggagaggatgaggggtagagtagttcaggacctgaacgaaagatctttgtagacaaatgttaggctctgcaaatgggttctgcggcaggactgaggtgggattctgtggtgaggttctgtgagatctgaccacctggcccccgtatctccctccactggtggcaggtgatgtgctggcatccctaggcagcagtgtatctgcttcctgtctggggtgtgagctgcatttattctcagaatgatccttattgataagacttgagctggccttcctatcatggatgtggaatacattagtgaccttacaaagttggtgggaacagatactttaccttcttaaacaggagtttaggagcagtgggtccccatcttttggactagctcttaacgttacttttccccgctgtagtgtagcacagccactccccttcactgggggacctcagtgagttggtcagctctcttggccttacatgtggcagttgttttcttgtttgcaggtgcggccgggtgtgtggcaacattacttcatgatgcagccatgaaccctgcggaagtggtcaagcagaggatgcagatgtacaactcaccataccaccgggtgacagactgtgtacgggcagtgtggcaaaatgaaggggccggggccttttaccgcagctacaccacccagctgaccatgaacgttcctttcaagccattcacttcatgacctatgaattcctgcaggagcactttaacccccagagtcggtacaacccaagctcccacgtcctctgtggagcgtgcgcaggagctgtagctgccgcagccacatccccactggacgtttgcaaaacactgctcaacacccaggagtccttggctttgaactcacacattacaggacatatcacaggcatggctagtgccttcaggacggtatatcaagtaggtggggtgtccgcctatttccgaggggtgcaggccagagtaatttaccagatcccctccacagccatcgcatggtctgtgtatgagttcttcaaatacctaatcactaaaaggcaagaagagtggagggctggcaagtgaagtagcactgaacgaagccaggggttcagatgacactgctgcatcctggtcacattctctgtctcctggaatgctcccacctcaagtggagttagaaggaaggtagaggggctctcccccaggattttggtgttttgactaacaccagttcctgccaacctctgttgccaccacctttccttccaggccctaagcacgtgcagcaaagcacaccacagcacctttgataacctctctccatcctgggcctgatgacctgctctagactgttatagagggataagcagttcattcccctggttgcctaataaaaagcctttaaant

SEQ ID NO: 575 - DNA, 1434 bp, Homo sapiens
cttttaaggtaagcttcttttggctttttttcagatgttcaccaagcttaagtttaaaataataggtattctaaaagagtatcctaattttcttatctgtattcttttagaataccctaatgtttcagacagtgatattctcttgttatttctaaggctaaattggcagagtatatcatctaaagccaaacactgaagaaggtgagaacccactcccacccagccagcatttcctggaacagacaagctgctgcttccttgctggctcacttagtgcattcctgggatggtctggcacccaggctttttattctttttgatcattgttcttactgaggtgccttcctagaacaagagccacttacaaaatagcttataattattatgtaccacacaactactattgtttgatgtatgactgctgagagcttgagtgcatgcagagagtgactgaagacttagtagaggaataaattctgagcctgtctaaggtggggctaaggaacagatgagtaataagaggctcttggatttttttaaccaatgcaactgaccctttcaatcagttttctttgaattacatctacaagttttgttccactcagctaccagtcaactaggcatgctccacagtatcacaggaagaaggtcagaaatctggaactgaagctaaaagaagtgaggatgtagaagccacattcctcttcaaggtagtgtgtgaaagaaccgccccctcttgacaggaggatgaccgtcgccattcttgcgtgggactgactcacccagctgagaggaggaccaatagaaagaaaattcacatttgagtccacctctcttcccttttttctggccttcattcataagatctggttgtttgggctgtaggtggcataattcatgtttattttggcctctgtcacatccagtttctttagcttttaaggtaagcttcttttggctttttttcatatgttcaccaagctaaaatttaaaataataagaccaggtttctctctctacaagtggattataaacattttcaccaaatcatgacaatactccagctttccggtccggcttcctaggagcctggagttagcaaaggttgtctctggatttcattctctgagaatatcccggggcctgggggggggtgaatttacatgaaattgcaacatcccccccttttttttttctggtgttaggctggttgtctttcctcccttacaaatcatgttggttttttgatttgttccgcatgttttatgttttttgtagaaatgtttatataacatccgctttccatttcggggaaaatcatttctgtttaataaattggctataactttaatttctgtggccaacttgtaaaatttggaatgtttcatttgtagaaggtttaaagatatccaaataaatgctttgggtgttggc

SEQ ID NO: 576 - DNA, 1850 bp, Homo sapiens
  misc_feature 2,: n=a,c,g, or t
cntttctaagggaggaatggagatgggcaaacatctggtgcctgcccagatctctaccagtggtctgatggaagcaattcccagtaccgaaactggtacacagatgaaccttcctgcggaagtgaaaagtgtgttgtgatgtatcaccaaccaactgccaatcctggccttgggggtccctacctttaccagtggaatgatgacaggtgtaacatgaagcacaattatatttgcaagtatgaaccagagattaatccaacagcccctgtagaaaagccttatcttacaaatcaaccaggagacacccatcagaatgtggttgttactgaagcaggtataattcccaatctaatttatgttgttataccaacaatacccctgctcttactgatactggttgcttttggaacctgttgtttccagatgctgcataaaagtaaaggaagaacaaaaactagtccaaaccagtctacactgtggatttcaaagagtaccagaaaagaaagtggcatggaagtataataactcattgacttggttccagaattttgtaattctggatctgtataaggaatggcatcagaacaatagcttggaatggcttgaaatcacaaaggatctgcaagatgaactgtaagctcccccttgaggcaaatattaaagtaatttttatatgtctattatttcatttaaagaatatgctgtgctaataatggagtgagacatgcttattttgctaaaggatgcacccaaacttcaaacttcaagcaaatgaaatggacaatgcagataaagttgttatcaacacgtcgggagtatgtgtgttagaagcaattccttttatttctttcacctttcataagttgttatctagtcaatgtaatgtatattgtattgaaatttacagtgtgcaaaagtattttacctttgcataagtgtttgataaaaatgaactgttctaatatttatttttatggcatctcatttttcaatacatgctcttttgattaaagaaacttattactgttgtcaactgaattcacacacacacaaatatagtaccatagaaaaagtttgttttctcgaaataattcatctttcagcttctctgcttttggtcaatgtctaggaaatctcttcagaaataagaagctatttcattaagtgtgatataaacctcctcaaacattttacttagaggcaaggattgtctaatttcaattgtgcaagacatgtgccttataattatttttagcttaaaattaaacagattttgtaataatgtaactttgttaataggtgcataaacactaatgcagtcaatttgaacaaaagaagtgacatacacaatataaatcatatgtcttcacacgttgcctatataatgagaagcagctctctgagggttctgaaatcaatgtggtccctctcttgcccactaaacaaagatggttgttcggggtttgggattgacactggaggcagatagttgcaaagttagtctaaggtttccctagctgtatttagcctctgactatattagtatacaaagaggtcatgtggttgagaccaggtgaatagtcactatcagtgtggagacaagcacagcacacagacattttaggaaggaaaggaagtacgaaatcgtgtgaaaatgggttggaacccatcagtgatcgcatattcattgatgagggtttgcttgagatagaaaatggtggctcctttctgtcttatctcctagtttcttcaatgcttacgccttgttcttctcaagagaaagttgtaactctctggtcttcatatgtccctgtgctccttttaaccaaataaagagttcttgtttctgg

SEQ ID NO: 577 - DNA, 1225 bp, Homo sapiens
  misc_feature 1184,1189: n=a,c,g, or t
ctccagcccaccgcccaccagccaggcatctgaaactgcatggaattctcctgccttgaaagacccagtggatggatcccggtgctgagctgaggttactcagaaccccagagccctctgagcttctgggtgccttgtttcttacacggtgtatccgatctgacacgcagccagcggagggccttcttaaagagtctctctttgtaagtgacttccagggaaggaccagacatcctctggttccattgatgcaaataataaatgtccgactacaactactcgcttcttacccttctggcaggtttgggctttagtttcagacgcaatggccagcagcttcttattcccatcttactggcaaaggtgtcactccctggaggcacttgaaagggggttgggttggaattgtttaatctcttcaagtcgagccagtggttataaagccagacattattacccactcattaactcccttgttagggctttgcctttgggcagagctcccctgccagccaatccaaagtatgagagtggtgtgacttcatgtacacagttgggtcacctctagaccctggacaatccccttctcccatctgctgagaagggagttcagttggctgtccctgcctgcaggtaggagggtcaaattctgctttgccccttattccgtcttctataaagcctttcccagatgaccccagctcacaatgacccctcccttctctgagccgtggggctcattgtctcgagctgcatcacttgcctctgctatgggaccaaacagcaccctggtcctcatgctgagctctgcagagtaccgggggctagggtcagaccttatgggtcctgaggggataaggtgagagtggggcacaggtggcccagacagcccactccctccagccagatctcactcattagacacccaacctaggttcaaatcccctctcaggcacttactggctgagtgaccctgagaaaattgcttaacctttctggacctcggtttcctcatctgcaaaatggacactataataatagccacctcaggatatgattcagtgaattaatgaagcaatgtgtttagcccaggacctaactagagttagccttcagtatatgtaagctattgttaccaattaagttatttttataggttttaaatattgggtctgtggataaanttcgnttggaggagaaaagtttgctactaaaacaaacaaac

SEQ ID NO: 578 - DNA, 1589 bp, Homo sapiens
agtaggtggtttgagtttggaggctttgttatatgaaaaatttgtatctttaaacagtagcatccagctcagtgcagagaaatgagaagcgtaaagaaccagtgcctgactgtaggaggtaacaggccccgggcttccactccagtgtactcgggtgtgcatgcttactggggagaagggcaggtgggagcaatggcactgcttaaatttcttttgtgctgttgcacccctgtatgtgcactttgcacttgcagtctcactagctctctcgctttcctttccaggcatatatatttagattctggtatcgtactcattggtttatgctacagctgtaaccccatgcctgagagttgcatgagtactgatgactgcaaattatttatttttgtatcctcaattccttgaatagttgaattggggctcaatacatgtttgctaaatgatgattgcatttaactgtgagcagctttttcagatattaatcaaaatgcctgcaaagactacacagttgcaagggacatcagcttatatcccaacattattggttcctgatccatagttgtgagaccttggttgattccctgatagtacagcaactccctgggaatggaagttcaacttgttggctttagaacaacataagcagtttcattgaacattcactgaatgtctcctctgtgctgagcccatgtcagggactgggtctttaatcatgttcttgtatgcagcatccctgcactctacctgcacatgacttctgaacagcatgctctgcccagacagcctcagtgagggccaggacttgaaccctgtggaagcatgtaaagacatatttccgtggtggcagaaggctgagagttcagcatactgtctgtcttcacttttgagttgttctttcatctgcctaagactcatggcagagcactcatttcacaaactttcactgagtgccgactatgtgccaggcactgtgccatgtgctgaaagtacaaagactttaatatgtagtccttgacctcaaagagctcaagagtaattgacagaaattcctagatcatgatctgtgatgatgagaatcattccttagaagggcttgcatataaacatatttatatacttattttgtaggaaaatatccttggtaggcttaaaaaaataaggattgatcatccatgtcaagcctgacataaattttaataaatcggtgtgagcaaaaggaaaaaaaatgtacaataataataaaataaaaccgtagtcatttatacttcatgctgtagttctaaaataaaaattctcctttggggctggtgtggtggctcacacctgtaatcccagcactttgggagtctgaggcagggggattgcttgggcccaggagttcgagaccatcctaggcaacatagtaagaccctgtctctacaaaaaaatgtaaaaaattagctgaacatgatgtcgcgcacctgtggtcctagctattcaggtggctgaggtggaaggactgcttgagcccggaaggtcaaggctgcagtgagccatgatcaagccatgatcactccagcctgggtgacagagtgagcccctgcccc

SEQ ID NO: 579 - DNA, 1333 bp, Homo sapiens
tttcgttgcatgtgatggttctgtggacatatgatccccacaaactgtgggagtgattggccaggccttgttttgtttgtttgtttgtttgtgtttttgttcttttgaagaatagagtggtatttagaaaataaattgcattgcaaagctcttatcggctcatatgagagagcaggttcctgcccttgaaaatgccggtaagctatagcatatgttttttaagacttaagcatttcatgctttaaaataccttcacaagtgaacattacacacagaagttcatttggttttcctttgttttatggtgcatatagcaataaagacccccctccaccctgcaacccccatcccccaccgggcctttgtccctgccttggcttttctccccttctcattctcctctcccctttcctcactgaaggctgtgagttgctttcaatgtgacaacactatgatgtcatttggaaggatttgccaggacagactgattctgagtcctgggtgccgtatgtgtatgcggcagtgttgtcaggcgatcttgtttgaagctctatgttgccataattaccatcaagtacacactgttggcaaaaggctaacacctgactttagaaaatgctgatttgagaacaaaaggaaaggtcttttttcactgcttaaagtggggtcactttgatacctttgcggtcatgtctgtgtctgatgagtgtagaatctctggatgtgcactgtcagtcatgtgtccaccaggcctcgaatatcatatgggaaatgtcatagttaaaaacgtacagccaggcccgtgtgctgttaatagtgtgaaattgtcatgttaaaaaaaaaaacaggaaccaaatgtgaccttgtgcatatgttggtagctgaaaatcttcaaggctactgatgggtggccccttaatcttgtctttgattgctgtgtgcagggaaaggtgtccccgtttgttcatgctgttttggggggtgggggggtatttgcaagaatactcattttgacataataggtcctcttgtcagagaccctctcccccggacattaatggctgagcaggggccacatggattgattgtatccactccccattgacgatggcattgagcgtggctggcttatttccatcctacgtgtttttgggcttgctcttccgttttaagaggtgccgggggtacatttttgcactgaaatctaaagatgttttaaaaaacacttttcacaaaaatagtcctttgtcattacattttttactcatgtgtttgtacatttttgtatgttagtttgtgaatgattttttcagtaaaaaatacatattcaagt

SEQ ID NO: 580 - DNA, 1061 bp, Homo sapiens
  misc_feature 1025: n=a,c,g, or t
acttcgctatattgtacggtgcaggtcttattgtcattttctcgactttggcagaaattgataaagaaggtgtgattgaaccagacactgatgctcctcaagaaatgggagatgaaaatgcggaggtaagttcggtgacttgatttcctgcttgttctaagaaatgtgaaaggtcctgctgttgcaatgattttatgacacgattcttccaggaaaagcgcatagtaaatctttctctgacttcaggcgttttaggcaagcattgtattttactacttaaaatactaatgaaaataaatactgttactttctgttttatctgttttttaagtttgcatctggtgtgactgcttgcactgtaacgcagaattcacttaaaatacatacctattagtggagttgctcttgatggaatatctaatgccaaattgtattacagaatggtttgtcataacaggccctcaagggagtgaaaattggttcttgggaggagggcttaaaaaaaattctatatattacaatggttagtggtcctccaaagactcatagaatattaatatgtagtgtatctgtggtattaaaattggggatatggaaatgaggaaaagatgtctaaaaaggctccttagtgtctgataaaaatttgagaaacactctaatatagtaatagcagttttaaaagattggtttttatcctcaaaacttgatattatcagatttcatctttgccaagtattgtgggaaatggtatctttttgtggcttttaatttgcattttcctggccagacagggtgctcacgcctgtaatcccagcactttgggaggccgaggtgggtggatcatctaaggtcaggagtttgagaccagcctggccaacatggtgaaaccccgtctctactaataatacaaaaataagccaggcatgatggtgcacgcctgtagtcccagctgcttgggaggctgaggcgggagaatcacttgaacccaggaggcagaggttgcagtgaggtgagatcgccccccngcactccagcctgagcgacagagcaaaactctattt

SEQ ID NO: 581 - DNA, 1634 bp, Homo sapiens
cccagtttacctgaactgtgtgttgaagagtgatgtcctgcagcctggagctgaagtcactactgatgacccctatgtccgacagctagttacctccatggatgtgactgagaccaatgtcttcttctaccctcggctcttacctttgacaaagtctcccgttgagagtactaccgaaccaccagcagttcgagcctctgaagagcgtctaagcaatggggatatatatttactggagaatgggctcaacctcttcctctgggtgggagcaagcgtccaacagggtgttgtccagagccttttcagcgtctcctccttcagtcagatcaccagtggtttgagtgttctgccagttctggataatccactgtccaagaaggttcgaggcctcattgatagcttacgggcacagagatcccggtacatgaagcttaccgtggtgaaacaggaagacaagatggagatgctgttcaagcacttcctggtggaagacaagagtctgagtgggggagcatcttatgtggactttctctgtcatatgcacaaggagattcggcagctactgagctaaagcaagtgggtaaatggcatagggcccaggctagcttccagaaagcaccccaggatgtcagagaaattgggacagtaacatatcttatgtaagctgacctcagtctctctggggggagggggagatataaggagacaccttctttctgggctcaagtatcctgccactctgtcatgtcctgctgatggaaggtgcccctgttccctcattctaccctctttttcctgctaatcctgtcataatgaatgtagcttctcagttcactgtatatgattcggtattgggggtttggaggcacccagaccctggcaatattatgtgtccctttggaccagtctcccaagaggagaggggcaggcaggaaagagtggggatcctaaggttactacagggggctcagtgtcatccacaacttcctatattagggataaaacatataggtgcacaagagctggggtatagcccataggtggtggagagaaaagtggtcagtccttcttgggcctggaggttagcagtcaagtttctctgctttcactgctcgctcgctctctcctgcaatgattgatgatcactccgtggatagagaggcacactgtcagaggtgaccggagaactgagttgcaaaatatattaagatctggtagaggtaccagcttcctttccagctggagaggccccaacactggatggttctgtagggagcctagggagcctggtcatcaacttgcaatacctcacagagccagttcacatcccactctgagctcccacgagaaacactgcttctccaggcccggggttgttggggagagaggcagaggcagctggagcgccgttctctcctgctgggacaccgcttgggctttggattgactgagtggctgacagttatcttccaaccccaactggcttgggggcaggacaagggctaggcttgatggtggccaggcttgcctgctccccacctgggatgcccctgctctggacctctcatttctcttcattggtttatttttcaatgcatctttaatttgtaaagaaataaaataaattaagatgt

SEQ ID NO: 582 - DNA, 1222 bp, Homo sapiens
gcgggcggtgggggcgccagcagcgcggaaggcgggcacgcgggccatggctccctgggcggaggccgagcactcggcgctgaacccgctgcgcgcggtgtggctcacgctgaccgccgccttcctgctgaccctactgctgcagctcctgccgcccggcctgctcccgggctgcgcgatcttccaggacctgatccgctatgggaaaaccaagtgtggggagccgtcgcgccccgccgcctgccgagcctttgatgtccccaagagatatttttcccacttttatatcatctcagtgctgtggaatggcttcctgctttggtgccttactcaatctctgttcctgggagcaccttttccaagctggcttcatggtttgctcagaattctcggggcggcacagttccagggaggggagctggcactgtctgcattcttagtgctagtatttctgtggctgcacagcttacgaagactcttcgagtgcctctacgtcagtgtcttctccaatgtcatgattcacgtcgtgcagtactgttttggacttgtctattatgtccttgttggcctaactgtgctgagccaagtgccaatggatggcaggaatgcctacataacagggaaaaatctattgatgcaagcacggtggttccatattcttgggatgatgatgttcatctggacatctgcccatcagtataagtgccatgttattctcagcaatctcaggaaaaataaagcaggagtggtcaattcactgtaaccacaaggacccatttggagaatggttagaataagtatattccactaactactaggcgagagctgatgatctacgtatccatggccgtcccctttgggttccccaaattaacatggtggctagtggtgacaaatgtcttctttaatcaggccctgtatgcctttttcagccaccaattatacaaaggcaaattagtctcttacccgaagcataggaaggctttcctcccaattatgtataaagttaaccaaagtcatgaggaatgcaaaccaggtgatggtttcaatgcctaaggacagtgaagtctggagtccaaagtacagtttcagcaaagctgtttgaaactctccattccatttctataccccacaagttttcactgaatgagcatggcagtgccactcaagaaaatgaatctccaaagtatcttcaaagaataaatactaatggcagatctgc

SEQ ID NO: 583 - DNA, 1578 bp, Homo sapiens
  misc_feature 285: n=a,c,g, or t
cacccctccttgggagaatcccgtagatcacagctcctcaccatggactggacctggagcatccttttgttggtggcagcagcaacaggtgcccactcccaggctcacctggtgcagtctggaggagaggtgaggaatccgggggcctcagtgcgggtgtcctgcaaggcctctgattactccttcactagttatggaatcacatgggtgcggcaggcccctgggcaaggcctcgagtggatggggtggatcagcgcatacaatggaaacacaaattatgcacanaagttccagggcagagtcaccttgaccacagactccgccacatatacagcctttatggacctgacgaatctagaatttggcgacacggccgtctattactgtgcacgcgaccgaattgatgggagtggcaggcgtcttgacttctggggccagggaaccctggtcaccgtcgcgtcacctccaccaagggcccatcggtcttccccctggcaccctcctccaagagcacctctgggggcacagcggccctgggctgcctggtcaaggactacttccccgaaccggtgacggtgtcgtggaactcaggcgccctgaccagcggcgtgcacaccttcccggctgtcctacagtcctcaggactctactccctcagcagcgtggtgaccgtgccctccagcagcttgggcacccagacctacatctgcaacgtgaatcacaagcccagcaacaccaaggtggacaagagagttgagcccaaatcttgtgacaaaactcacacatgcccaccgtgcccagcacctgaactcctggggggaccgtcagtcttcctcttccccccaaaacccaaggacaccctcatgatctcccggaccctgaggtcacatgcgtggtggtggacgtgagccacgaagaccctgaggtcaagttcaactggtacgtggacggcgtggaggtgcataatgccaagacaaagccgcgggaggagcagtacaaacaagccgtaccgtgtggtcagcgtcctcaccgtcctgcaccaggactggctgaatggcaaggagtacaagtgcaaggtctccaacaaagccctcccagcccccatcgagaaaaccatctccaaagccaaagggcagccccgagaaccacaggtgtacaccctgcccccatcccgggaggagatgaccaagaaccaggtcagcctgacctgcctggtcaaaggcttctatcccagcgacatcgccgtggagtgggagagcaatgggcagccggagaacaactacaagaccacccctcccgtgctggactccgacggctccttcttcctctatagcaagctcaccgtggacaagagcaggtggcagcaggggaacgtcttctcatgctccgtgatgcatgaggctctgcacaaccactacacgcagaagagcctctccctgtccccgggtaaatgagtgcgacggccggcaagcccccgctccccgggctctcgcggtcgcacgaggatgcttggcacgtaccccgtctacatacttcccaggcacccagcatggaaataaagcacccaccactgccccg

SEQ ID NO: 584 - DNA, 1951 bp, Homo sapiens
ggattccaaggcttttccacttgctgatcagcactgaacacagaggactcaacatggagttggggctgtgctgggttttccttgttgctattttagaaggtgtccagtgtgaggtgcggttggcggagtctgggggaggcttccaacaaccaggagggtccctgagagtttcctgtgcagcctctgccttcagtttcagtacctatgcaatggactgggtccgccaggctccggggaaggggctggagtggatctcatacattagtagtagtggtgattccatatactacgcagactctgtgaagggccgattcaccatctccagagacaacgccgagaactcactgcatctgcagatgaacgacctgagagtcgaagacacggctctttattactgtgcgactggattggggtggagtgacgaacagtccgactactggggccagggaagcctggtcaccgtctcctcggggagtgcatccgccccaacccttttccccctcgtctcctgtgagaattccccgtcggatacgagcagcgtggccgttggctgcctcgcacaggacttccttcccgactccatcactttctcctggaaatacaagaacaactctgacatcagcagcacccggggcttcccatcagtcctgagagggggcaagtacgcagccacctcacaggtgctgctgccttccaaggacgtcatgcagggcacagacgaacacgtggtgtgcaaagtccagcaccccaacggcaacaaagaaaagaacgtgcctcttccagtgattgctgagctgcctcccaaagtgagcgtcttcgtcccaccccgcgacggcttcttcggcaacccccgcaagtccaagctcatctgccaggccacgggtttcagtccccggcagattcaggtgtcctggctgcgcgaggggaagcaggtggggtctggcgtcaccacggaccaggtgcaggctgaggccaaagagtctgggcccacgacctacaaggtgaccagcacactgaccatcaaagagagcgactggctcagccagagcatgttcacctgccgcgtggatcacaggggcctgaccttccagcagaatgcgtcctccatgtgtgtccccgatcaagacacagccatccgggtcttcgccatccccccatcctttgccagcatcttcctcaccaagtccaccaagttgacctgcctggtcacagacctgaccacctatgacagcgtgaccatctcctggacccgccagaatggcgaagctgtgaaaacccacaccaacatctccgagagccaccccaatgccactttcagcgccgtgggtgaggccagcatctgcgaggatgactggaattccggggagaggttcacgtgcaccgtgacccacacagacctgccctcgccactgaagcagaccatctcccggcccaagggggtggccctgcacaggcccgatgtctacttgctgccaccagcccgggagcagctgaacctgcgggagtcggccaccatcacgtgcctggtgacgggcttctctcccgcggacgtcttcgtgcagtggatgcagagggggcagcccttgtccccggagaagtatgtgaccagcgccccaatgcctgagccccaggccccaggccggtacttcgcccacagcatcctgaccgtgtccgaagaggaatggaacacgggggagacctacacctgcgtggtggcccatgaggccctgcccaacagggtcaccgagaggaccgtggacaagtccaccggtaaacccaccctgtacaacgtgtccctggtcatgtccgacacggctggcacctgctactgaccctgctggcctgcccacaggctcggggcggctggccgctctgtgtgtgcatgcaaactaaccgtgtcaacggggtgggatgttgcatcttataaaattggaaataaaaagatccatcc

SEQ ID NO: 585 - DNA, 1452 bp, Homo sapiens
  misc_feature 1378-1384: n=a,c,g, or t
ctcctggcaccgctatgagcatgggcgcttctggcctttcctgcgagagtcagatgcagacgcagtggggcggggacagggcctcggcttcactgtcaacctgccctggaaccaggttgggatgggaaacgctgactacgtggctgccttcctgcacctgctgctcccactggcctttgagtttgaccctgagctggtgctggtctcggcaggatttgactcagccatcggggaccctgaggggcaaatgcaggccacgccagagtgcttcgcccacctcacacagctgctgcagggcggctaccacctggagtcactggcggagtcagtgtgcatgacagtacagacgctgctgggtgacccggccccacccctgtcagggccaatggcgccatgtcagagtgccctagagtccatccagagtgcccgtgctgcccaggccccgcactggaagagcctccagcagcaagatgtgaccgctgtgccgatgagccccagcagccactgcccagaggggaggcctccacctctgctgcctgggggtccagtgtgtaaggcagctgcatctgcaccgagctccctcctggaccagccgtgcctctgccccgcaccctctgtccgcaccgctgttgccctgacaacgccggatatcacattggttctgccccctgacgtcatccaacaggaagcgtcagccctgagggaggagacagaagcctgggccaggccacacgagtccctggcccgggaggaggccctcactgcacttgggaagctcctgtacctcttagatgggatgctggatgggcaggtgaacagtggtatagcagccactccagcctctgctgcagcagccaccctggatgtggctgttcggagaggcctgtcccacggagcccagaggctgctgtgcgtggccctgggacagctggaccggcctccagacctcgcccatgacgggagtctgtggctgaacatcaggggcaaggaggcggctgccctatccatgttccatgtctccacgccactgccagtgatgaccggtggtttcctgagctgcatcttgggcttggtgctgcccctggcctatgcttccagcctgacctggtgctggtggcgctggggcctggccatggcctgcagggcccccacgctgcactcctggctgcaatgcttcgggggctggcagggggccgagtcctggccctcctggaggagaactccacaccccagctagcagggatcctggcccgggtgctgaatggagaggcacctcctagcctaggcccttcctctgtggcctccccagaggacgtccaggccctgatgtacctgagagggcagctggagcctcagtggaagatgttgcagtgccttnnnnnnntggtggcttgaaatcggccaaggtgggagcatttacaccgcagaaatgacaccgcacgccagcgcccc

SEQ ID NO: 586 - DNA, 1396 bp, Homo sapiens
gccgcttttttttttttttttttttttttttttttccttcttttttttttttaagcactagtctgtgctttgcgaacagaatcaagacattaacaaagatcagcttctctgaagaaaagcatttctatagaacaaagacagctacatgtttcgctgccattacacagctccaaagcaggaaaagaaaatatttacaaaatacaaggttttttttttccattttttgtttttgttttttttttcaatgctaaaagggttattcagaattttcaaccttataaatagaagaagcactttatgcatagggatatggtgcattattgtatttttttttaaagaaacaatgacaaaccctttaacttgcaaacagaaaaaaaaatcactaatgttgaaaattgtgaaaaaaccccaaccattaagcagttgtctactatttttatacgattacaaaatggccaaaaaaaaagagtcttctcccccctccccctttttggtgatgtgatcatacaggagacaggcacaaggttaacagagaagggtgaagggggaacaatgggaaccacagctaggccagacaatgttccacaggcaaggggagcgtgaaagaccaagagtggaactaacaccgacagggatctggatgtgaaggaaacatggcaaagtgaatcagagggaaaaaaaaaaaaaaaatcacacagggagatggctgctcacttcccacaacccccagtttgcaggggagtgggaatagaggttaagtagtcctaaccctaccttcaaagatcaggataggtggtaaaaatattccaagtggaaggacgggttgtgggtgtgtacatggcatgggagagcagacagggaagggtaccaaggggcatgaggaggggaacctgagcagccacagccaggttactgcagtgaaagagtcaaaacagagaagaccaaatgcagatgaaacaaaaaatcagtctcttaagttctgggtgagaaaggagaggtgttctgccagctgagcactcggggagagcagctggcagttatggcagagaggctctggtggggatgttccagcacgaaaaaccaaggggacccagccaggagggccacagcagagccaagccacagatggggggggggggggtaagagtccagagcaccctgccccattccaccctagctcaagaaggccatgctaaactgtagcccgccaggctgttctgccctgcccacgggtgtgggggggggggtggtcatctaagatcagtaagtccagtgattcaacagtgcagaggatgtgccaggaccaggccagcagggtctcatcctgaacttctgtttgccgaacgggaggaagtgctcaggtgtgtgacaagaaaacatggaaacaaaaacaaaa

SEQ ID NO: 587 - DNA, 2047 bp, Homo sapiens
cgcttggttgcgtgaccgcggggtccgcgtccgctccctccacccttcgcccttcgcccttcgcctcgttccggcctccgcggcccagcaacggccgtcatggtgccgtcggcgctccctgcgcggccccgctgagcctcggtgcggcggcgagcgcggtcgagatcgccatgcctacccgagtatgctgctgctgttccgctttgcgtcctcgctacaaacgcctggtggacaacatattccctgaagatccaaaagatggccttgtgaaaactgatatggagaaattgacattttatgcaagtatctgctccagagaaactggatcgaattggttcttacctggcagaaaggttgagcagggatgttgtcagacatcgttctgggtatgttttgattgctatggaggcactggaccaacttctcatggcttgccattctcaaagcattaagccatttgtagaaagctttcttcatatggtggcaaagctgctggaatcgggggaaccaaagcttcaagttcttggaacaaattcttttgtcaaatttgcaaatattgaagaagacacaccatcctatcacagacgttatgacttttttgtgtctcgattcagtgccatgtgccattcctgtcatagtgatccagaaatacgaacagagatacgaattgctggaattagaggtattcaaggtgtggttcgcaaaacagtcaacgatgaacttcgggccaccatttgggaacctcagcatatggataagattgttccatccctcctgtttaacatgcaaaagatagaagaagttgacagtcgcataggccctccttcttctccttctgcaactgacaaagaagagaatcctgctgtgctggctgaaaactgtttcagagaactgctgggtcgagcaacttttgggaatatgaataatgctgttagaccagtttttgcgcatttagatcatcacaaactgtgggatcccaatgaatttgcagttcactgctttaaaattataatgtattccattcaggctcagtattctcaccatgtgatccaggagattctaggacaccttgatgctcgtaaaaaagatgctccccgggttcgagcaggtattattcaggttctgttagaggctgttgccattgctgctaaaggttccataggtccgacagtgctggaagtcttcaatacccttttgaaacatctgcgtctcagcgttgaattcgaagcaaatgatttacaggggggatctgtaggcagtgtcgacttaaatacaagttccaaagacaatgatgagaagattgtgcagaatgctatcatccaaacaataggattttttggaagtaacctaccagattatcagaggtcagaaatcatgatgttcattatggggaaagtacctgtcttggaacatctacccatactttggatatcagtcaactaggggatttgggaaccaggagaattccgataatgttgctgagatctttgcttatggtgacctctggatataaagcgaagacgattgttactgcactgccagggtctttcctggatcctttgttatcaccatctctcatggaggactacgaactgagacagttggtcttggaagtaatgcataatctcatggatcgtcatgacaatagggcaaagcttcgagggatcagaataataccggatgtagctgacctaaagataaaaagagaaaaaatttgcagacaagacacaagtttcatgaaaaagaatgggcaacagctgtatcggcacatatatttgggttgtaaagaggaagacaacgttcagaaaaactatgaactactttatacttctcttgctcttataactattgaactggctaatgaagaagtagttattgatctcattcgactggccattgctttacagaacagtgcaattatcaatgaggataatttgccaatgttccatcgttgtggaatcatggcactggttgcagcatacctcaactttgtaagtcagatgatagctgtccctgcattttgccagcatgttagcaagcttagaaa

SEQ ID NO: 588 - DNA, 1377 bp, Homo sapiens
ctctccccaggagacccagacctagaactacccagagcaagaccacagctggtgaacagtccaggagcagacaagatggagacaaattcctctctccccacgaacacctctggagggacacctgctgtatctgctggctatctcttcctggatatcatcacttatctggtatttgcagtcacctttgtcctcggggtcctgggcaacgggcttgtgatctgggtggctggattccggatgacacacacagtcaccaccatcagttacctgaacctggccgtggctgacttctgtttcacctccactttgccattcttcatggtcaggaaggccatgggaggacattggcctttcggctggttcctgtgcaaattcgtctttaccatagtggacatcaacttgttcggaagtgtcttcctgatcgccctcattgctctggaccgctgtgtttgcgtcctgcatccagtctggacccagaaccaccgcaccgtgagcctggccaagaaggtgatcattgggccctgggtgatggctctgctcctcacattgccagttatcattcgtgtgactacagtacctggtaaaacggggacagtagcctgcacttttaacttttcgccctggaccaacgaccctaaagagaggataaaggtggccgttgccatgttgacggtgagaggcatcatccggttcatcattggcttcagcgcacccatgtccatcgttgctgtcagttatgggcttattgccaccaagatccacaagcaaggcttgattaagtccagtcgtcccttacgggtcctctcctttgtcgcagcagccttttttctctgctggtccccatatcaggtggtggcccttatagccacagtcagaatccgtgagttattgcaaggcatgtacaaagaaattggtattgcagtggatgtgacaagtgccctggccttcttcaacagctgcctcaaccccatgctctatgtcttcatgggccaggacttccgggagaggctgatccacgcccttcccgccagtctggagagggccctgaccgaggactcaacccaaaccagtgacacagctaccaattctactttaccttctgcagaggtggcgttacaggcaaagtgaggagggagctgggggacactttcgagctcccagctccagcttcgtctcaccttgagttaggctgagccacaggcatttcctgcttattttaggattacccactcatcagaaaaaaaaaaaaagcctttgtgtcccctgatttggggagaataaacagatatgagtttaaaaaaaaaaaaaaaaaaaaaaaaaaaaaaaaaaaaaaaaaaaaaaaaaaaaaaaaaaaaaaaaaaaaaaaaaaaaaaaaag

SEQ ID NO: 589 - DNA, 1369 bp, Homo sapiens
  misc_feature 495,1362: n=a,c,g, or t
gcagagacatggctgcatttattgttcccagcccggcgagaaggtgttcccagaaaggttccttgggtcacctgcccacccagccttggctctgggctgccatgtccccacgggggcaggagagaggcacaagtcacagtcaggcaagggagcctcagcgtcctgggcggtggctgttggggtccctccagtcttcacctgggaccctcggccaggctgggacagcatccaggaggcgaggctgcatggtccagcggtgggtgcaggtggcaacaggtcggcgggctgtgcaggttccaaaaggagctctcgggtttggcactgggttagaccagccccggggccagcaggggaatgagcggtggaccagggggttgctgggcactgggtgggcccatctcctgtccttccctcatggctgctggaagggccgcctccctggctcagcatcatctcagattccgggactcaaagaccgtctcctcgtcgctgtcnagcgaggccatctccgtggggtcctcagtgttggcgaggaggccgtatcgcctccgctgaggcttcttcaacctaaacgcccggatcaggaagtagagcgcggtcaggccgcagaagcccaggatcacgtagaaggagcgcgtcagcgccgagcccgacgccccggcggacgcgtgtgcgtgctgttgtgtggcgcgcccggctggctcccgttcgtcacggccggcggcggcgacaacgtgacctgcgcggggcgcagcggcgaggcctcttcggcaccgcacggcagcgccgccagcagcaacgccagcaggagcagcagcagcggcggctgcagcacgcgcggccccatggcccggcggaagcggtggcggcgccccgcccctatgcgcgctgtcagtcaggcgcgcggaagttatgccagccaatggggcgcggaggcggagcttgacgccgggccccgcctccgcctggtgagccccggcgctacccacagtgccccgcgcgcccgccgcggaacttgcttcgtcgacccgctccaaggggatcaggacggaggcccggagcccgcccgtgggagtcccggcaaggcgcagccggcagagcccagaactgccagcccagcgtggggggtcgcggcttccgaggaaatcgggctggcagcggggagacgggggcggacccccgacttcaggacgtcgggccgctcattcccacccacttcggggcgacccccgccactctctgccccggcctcacggacactgagaacgcgtcggccacgtccagggctccaggaaggtggcgccccgctccccagcctgctacagggaacgcgcgggactcggcccaggacggggcgtgacnagcgggc

SEQ ID NO: 590 - DNA, 888 bp, Homo sapiens
gatggaggcgctgattttggaaccttccctgtatactgtcaaagccatcctgattctggacaatgatggagatcgactttttgccaagtactatgacgacacctaccccagtgtcaaggagcaaaaggcctttgagaagaacattttcaacaagacccatcggactgacagtgaaattgccctcttggaaggcctgacagtggtatacaaaagcagtatagatctctatttctatgtgattggcagctcctatgaaaatgagctgatgcttatggctgttctgaactgtctcttcgactcattgagccagatgctgaggaaaaatgtagaaaagcgagcactgctggagaacatggaggggctgttcttggctgtggatgaaattgtagaatggaggggtgatcctagagagtgatccccagcaggtggtacaccgggtggcattaaggggtgaagatgtcccccttacggagcagaccgtgtctcaggtgctgcagtcagccaaagaacagatcaagtggtcactccttcggtgaagacctcactgttcctggctcttcatcctcttcaaaaaatttgcatgtctgctgtgaattttcatctagttccccaatcgatgctctcagggtcatctcggggatcacagggatccttaaatctccattctgtttgtggttgccccctcaacctcccctacacccttcctattctttttcattcttcttgcagttctgggagtaaagctcccagcatatttagataatagggcaggggaagcaccctctttctttctagactggattatgctcacatgctcccttgccctgacatttttgtaaattctgtgccctttgctgtagctacacttcagattaaagtaggagaaag

SEQ ID NO: 591 - DNA, 1202 bp, Homo sapiens
tacagttttggttataaaattcatttgtggcacgatgcaacattaaccccaaggacaaggaatatctaccaaatgataactttctccatatgcacagggcaaatatgtcatgtgtaatattaaccaatacatttttgcaggtattaaaggtttgatacactcagcatggacaagccataccaatagaaaaaaaccactttctatgctttaattcaaaaggtaattagactatcttacttagttatctgtgtgtcattaggacctgaatcatactgaaaattagtggttagtttatagtttctgagaatgtatgatcattacattgaaatacaatctctctcatgtatacatttttctatcatcatgtgtgaagccagtgactatgaaatttttcatgatcatttcttatttccttttagattttatgtttacaataaaaagaaacgtcttgtcaacacaccttacgtggataactcctataaatgggctggtggtggatttctgtctacagtgggtgaccttctgaaatttgggaatgcaatgctttatggttaccaagttgggctgtttaagaactcaaatgaaaatcttttacctggatacctcaaaccagaaacaatggttatgatgtggaccccagtccctaacacagagatgtcttgggataaagagggtaaatatgcaatggcgtggggtgttgtggaaaagaaacaaacgtatggttcgtgtagaaagcaacggcattatgcttcacatactggaggggcagtgggtgccagtagtgtcctgctggtccttcctgaagaactggatacagagactattaattaacaaggttcccccaagaggaatcattgtttctatcatatgtaacatgcaatctgttggcctcaatggcaccgctttgaagattgcccttgaatttgataaggacagatcagactgataaccttaacaccatgggtgcaaaatgagttgttctgaggtttttttgaaacattaaagttccaaaacatgacatttttaagaataaatttgaaatggagtataattgaatgcagagaattatgtacctctaattgcttaattttgtaatggtcttttattgtagaattggttctttatactcagggaagtaattatattgtttttactttttgaaaagaagtgttaactcttgaaataaaatattctgataaaac

SEQ ID NO: 592 - DNA, 1740 bp, Homo sapiens
ctcctcgggagaatcccctagatcacagctcctcaccatggactggacctggagcatccttttcttggtggcagtggcaacaggtgcccactaccaggttcagttggtgcagtctggagctgaggtgaagaagcctggggcctcagtgaaggtctcctgtaaggcttcaggtgacattttcagtacttatgctttcagctgggtgcgacaggcccctggacacgggcttgagtggatgggatggatcagcgcttacaatggggatacaaagtatgtacagaagttccagggcagagtcaccttgacaagagacacatccacgagcacagtatacatggaaatctggggcctgagatctgacgacacggccgtctactactgcgtgagagagggattggacgcattgcgatcgtcctattggttatattactttgactactggggccagggaaccctggtcaccgtctcctcagcttccaccaagggcccatcggtcttccccctggcgccctgctccaggagcacctctgggggcacagcggccctgggctgcctggtcaaggactacttccccgaaccggtgacggtgtcgtggaactcaggcgccctgaccagcggcgtgcacaccttcccggctgtcctacagtcctcaggactctactccctcagcagcgtggtgaccgtgccctccagcagcttgggcacccagacctacacctgcaacgtgaatcacaagcccagcaacaccaaggtggacaagagagttgagctcaaaaccccacttggtgacacaactcacacatgcccacggtgcccagagcccaaatcttgtgacacacctcccccgtgcccacggtgcccagagcccaaatcttgtgacacacctcccccatgcccacggtgcccagagcccaaatcttgtgacacacctcccccatgcccacggtgcccagcacctgaactcctgggaggaccgtcagtcttcctcttccccccaaaacccaaggatacccttatgatttcccggacccctgaggtcacgtgcgtggtggtggacgtgagccacgaagaccccgaggtccagttcaagtggtacgtggacggcgtggaggtgcataatgccaagacaaagccgcgggaggagcagttcaacagcacgttccgtgtggtcagcgtcctcaccgtcctgcaccaggactggctgaacggcaaggagtacaagtgcaaggtctccaacaaagccctcccagcccccatcgagaaaaccatctccaaaaccaaaggacagccccgagaaccacaggtgtacaccctgcccccatcccgggaggagatgaccaagaaccaggtcagcctgacctgcctggtcaaaggcttctaccccagcgacatcgccgtggagtgggagagcagcgggcagccggagaacaactacaacaccacgcctcccatgctggactccgacggctccttcttcctctacagcaagctcaccgtggacaagagcaggtggcagcaggggaacatcttctcatgctccgtgatgcatgaggctctgcacaaccgcttcacgcagaagagcctctccctgtctccgggtaaatgagtgcgacggccggcaagcccccgctccccgggctctcggggtcgcgcgaggatgcttggcacgtaccccgtgtacatacttcccgggcacccagcatggaaataaagcacccagcgctgccctgggcccctgcg

SEQ ID NO: 593 - DNA, 1511 bp, Homo sapiens
  misc_feature 324: n=a,c,g, or t
tttctttctgtttattcaaaataaaaatacacatagaattatgaaaatataggtttactatttccaccacgtaggttgatgctgctgttgaaaggcttacaaactgtttttcaagtttttaaagctcatctcgatccctcaatagagtatacctatattcactgggtgctagtttctggaaggagctctcaggtggactgcttgctacatcttgggcttgctctcctggggctgtatcagttgggtcaggtccatgatggaattctctgtgcagttttccagaatgtaagtcaaatacgaattgcttgagttttccaggaattnatacatctttgaagtctccaaacacatacatatgcctaaagctgtcaatagcgattacaggacaatctgctggagttttctgtatgtgcagaagaggatgtctaaatttgtcacaatcggcatgtaaaaagtttattgtacctttttcacttattaattgccgagctacttcattctggaatatttctaaactttctgtatcttctttcatgtgaaagagtatgagaaaaggcagtccttcttctgtcaattcctctccattttcaaatgttatttctcggacaagaggaacacatttatcttgaatccaattgtaagtcacatcaaaatttgtcatagctcccaagtacaccatatccggagcagaatgccctggtggtttgtagattatgttgtcgccactatatctttccggttttgaaacatccccaaatgcagaaagaaaggcacagtcatcatgcaaaatattcgctactcgttcaaaaactctatagttgtccgagtccttttgctcaaaatatccaatgatatttcttttgctgcgatcaagagtggtgatttctgctaagtcccgaatttcttgaatggggtcacttttttgttgcctgatgtaatctgccaatgctttcactgatcgctgacccctgtattctctcttcatcatcatcccattacgaaacaatttgagggttgggtatttgcttatcctgtatctctgggctatgtcagagtgctgatcacaatcaactctggcaaacactacttgattttcatttggaaattcttccttaatgacatcggaagcttcctcaaaaattggatgcaacatctgactgaaacgacaccagtcagcataaaaatttactaaagcaacatcagcattgtttaaaatttcatctatattctctgtatcaagacttgttatttcagttgttacaggagtaaaaacccaagttaccaggagcagaagggagcatctgaggtcgggtaaggataggaagacggcaggatgcatggtaacgctggggtccgtgacagggacaggcgctggcggctgggactgggctaggttgggttgggttaggaaagggctgggctccgggagccgacggcagcggaggattctccaggcagcggcacctcgtcctctcgacccgggctccagcggcgaacacccggcttagaaa

SEQ ID NO: 594 - DNA, 1157 bp, Homo sapiens
  misc_feature 1032: n=a,c,g, or t
gctgaagggcggcctcaaagtggctttttgttagacaaggttaaggtttcctcatgagcaaggttgcagatcggtccttcctcagctccttgatttgtgaccttgaccaaggggcctgccacccagcccctccagtgccctctcctcgatgcctcgctccttcctgcccccactcccctggcttaggcaggtaggggaattagggccatgctggaagaagcttaaccatgtgttcaaagaacggtttcttgcttgcttggtcctggaactccccttggctgccccaggcctccttggcccatgggtgctgggggaggtggatgtcagatctggtaggttgcagcagagaaaataaatgtgccttgagagaccactcagagagggtccaagggtgatggagaaggaagcatggcctgggagcttggaagggaggggtggtgggtggcggcatcttgactgccccctgttgtcccacacgtggggggtggtcacccccttcactccagcccgcctgccttcagccttccatgagcttcacctgcttccaacttcactttggagggggtggggtccgttggcatcaacacggggaccctctgcttcaccaaagcccgagccctcagcccctggggagaacaaatggctgagctttgatacctggggtcgtcgagaggctgcgggctggcggcagtcccaggggagagacaccacagaaggagacccagacatcccgaggaagttcccagcagagcaaactgctttccagcctgaagcctgcttaaactgtgtgatgtgcaataactgagcttagagttaggaattgtgttcaagtgcttggatttccgtctgtagatttaactgctgaaattgtatctctcagtaattttagatgtcttttaaaaaattgaaaaacaaagtgttagactgtgtgcgtgtgcgttgatgggcactcaagagtcccgtgagtcatccagccctgcctttcccctgcgcccccatcctctcacgtcccgccccgcctccacttggggnccctgcctcgtgtcgtctttatctgcctattactcagcctaaggaaacaagtacactccacacatgcataaaggaaatcaaatgttatttttaagaaaatggaaaataaaaactttataaacacc

SEQ ID NO: 595 - DNA, 1590 bp, Homo sapiens
ctcactgcccagccgggatctcagggcttcattttctgtcctccaccatcatggggtcaaccgccatcctcgccctcctcctggctgttctccagggagtctgtgccgaggtgaagctggtgcagtctggagcagaggtgaaaaagcccggggactctctgacgatctcctgtaagggctctggatacagcttccgcagttactggatcgcctgggtgcgccagatgcccgggaaaggcctggagtggatgggaatcatttatcctggggactctgacaccaaatacagtccgtccgcccacggccaggtcaccatctcagtcgacaagtccgtcgccaccgcctacctgcagtggcggagcctgaaggcctcggacaccgccatgtattactgtgcgacgaacccctttcacagcgggagtttcgcctttgatacttggggccaagggacatcggtcattgtctcttcagcctccaccaagggcccatcggtcttccccctggcaccctcctccaagagcacctctgggggcacagcggccctgggctgcctggtcaaggactacttccccgaaccggtgacggtgtcgtggaactcaggcgccctgaccagcggcgtgcacaccttcccggctgtcctacagtcctcaggactctactccctcagcagcgtggtgaccgtgccctccagcagcttgggcacccagacctacatctgcaacgtgaatcacaagcccagcaacaccaaggtggacaagagagttgagcccaaatcttgtgacaaaactcacacatgcccaccgtgcccagcacctgaactcctggggggaccgtcagtcttcctcttccccccaaaacccaaggacaccctcatgatctcccggacccctgaggtcacatgcgtggtggtggacgtgagccacgaagaccctgaggtcaagttcaactggtacgtggacggcgtggaggtgcataatgccaagacaaagccgcgggaggagcagtacaacagcacgtaccgtgtggtcagcgtcctcaccgtcctgcaccaggactggctgaatggcaaggagtacaagtgcaaggtctccaacaaagccctcccagcccccatcgagaaaaccatctccaaagccaaagggcagccccgagaaccacaggtgtacaccctgcccccatcccgggaggagatgaccaagaaccaggtcagcctgacctgcctggtcaaaggcttctatcccagcgacatcgccgtggagtgggagagcaatgggcagccggagaacaactacaagaccacgcctcccgtgctggacttccgacggctccttcttcctctatagcaagctcaccgtggacaagagcaggtggcagcaggggaacgtcttctcatgctccgtgatgcatgaggctctgcacaaccactacacgcagaagagcctctccctgtccccgggtaaatgagtgcgacggccggcaagcccccgctccccgggctctcgcggtcgcacgaggatgcttggcacgtaccccgtctacatacttcccaggcacccagcatggaaataaagcacccaccactgccctggg

SEQ ID NO: 596 - DNA, 1044 bp, Homo sapiens
gttaaatttctgttttatctttagccagactgttactttgttggttaaagctgttttctgttgacttaataaaatatttatgataactaaaatgtgatagctgatacattactgtggaaagctgtttgaatctttctctagagctttctaagactatcatggaatgctttctgtctagacgatttcttctaagcctgagattttcgggaaaatgattgcaaatttactgttttagtgactgccatatgtcaatttgttgtagaatttaaatgtgcctgattcatctctccctgctgaaaatgaagccactggccctggctttgttcctccacctcttgctccaatcagaggtccattgtttccagtggatgcaagaggcccattcttgagaagaggacctcctttccccccacctcctccaggagccatgtttggagcttctcgagattattttccaccaagggatttcccaggtccaccacctgctccatttgcaatgagaaatgtctatccaccgaggggttttcctccttaccttcccccaagacctggatttttccccccacccccacattctgaaggtagaagtgagttcccctcaggtttgattccaccttcaaatgagcctgctactgaacatccagaaccacagcaagaaacctgacaatatttttgctctcttcaaaagtaattttgactgatctcattttcagtttaagtaactgctgttacttaagtgattacactttagctcaaattgaagcttaatggaattataattctcaggatagtattttgtaaataaagatgatttaaatatgaatcttatgagtaaattatttcaattttattttagacggtataactatttcaatttgattaatcccctattatataaacaatagtgggagttttatatatgtaatctttcaggtggggaggctttaaattctgaagtctgtgtctttatgccaagaactgtatttactgtggttgtggacaagtgtgaaagtaactttatgcttaaataaattatagttgatt

SEQ ID NO: 597 - DNA, 2018 bp, Homo sapiens
tgtctcccccactgtcagcacctcttctgtgtggtgagtggaccgcttaccccactaggtgaagatgtcagcccaggagagctgcctcagcctcatcaagtacttcctcttcgttttcaacctcttcttcttcgtcctcggcagcctgatcttctgcttcggcatctggatcctcatcgacaagaccagcttcgtgtcctttgtgggcttggccttcgtgcctctgcagatctggtccaaagtcctggccatctcaggaatcttcaccatgggcatcgccctcctgggttgtgtgggggccctcaaggagctccgctgcctcctgggcctgtattttgggatgctgctgctcctgtttgccacacagatcaccctgggaatcctcatctccactcagcgggcccagctggagcgaagcttgcgggacgtcgtagagaaaaccatccaaaagtacggcaccaaccccgaggagaccgcggccgaggagagctgggactatgtgcagttccagctgcgctgctgcggctggcactacccgcaggactggttccaagtcctcatcctgagaggtaacgggtcggaggcgcaccgcgtgccctgctcctgctacaacttgtcggcgaccaacgactccacaatcctagataaggtgatcttgccccagctcagcaggcttggacacctggcgcggtccagacacagtgcagacatctgcgctgtccctgcagagagccacatctaccgcgagggctgcgcgcagggcctccagaagtggctgcacaacaaccttatttccatagtgggcatttgcctgggcgtcggcctactcgaggtgatctggccccgcccccacccgcgatcggccctaaatccctagatggccctgcccttcatttcgcgtccttcggttgcctgggaaggacgagctcagggcggagcgcagcccaccccggccctcccgccgctccacccagcaccggagggtgggggcggcccagcttcagggagccctgattgggtgtacgcagggaaagcctcctgctattggctgcgatctccctcccctttctccgcagatgactgtcatggtgctgagcgtacagctacagcgcagggcactccgccggaaatgcgagcccgcacgtgccgggcgctgggattcgagccccgggcccagcctgatcgctgacggcggggcgggcacagcggcagtctgtggggtggctggggcatggcgggtgcctgccccaactggggagacaaggcaccgcagggcaagctgcccatggccctggggctctggccgctgtgggttcaagacgaggaccagcctgacactggaagtgcgggcgcagaattagaggaggcacaattagaggctgaggcagagggggaagacagatgagcctccaaaataaaggaccctgggcttgcttccgaccttactccttctcagcctctacccccacttgtagcagctattcccgcctcatcagccagccctgcggcagttcccgtcgagccccgcccttttctacctatccccttctccagcccctttccgcccaattcacggccccacccctgacctttctcgcccgggtgggcatcacccccgtctcgccagcaccccttcgacttctctgacctcatctcctttctctatagctcgggttcatgacgctctcgatattcctgtgcagaaacctggaccacgtctacaaccggctcgctcgataccgttaggccccgccctccccaaagtcccgccccgcccccgtcacgtgcgctgggcacttccctgctgcctgtaaatatttgtttaatccccagttcgcctggagccctccgccttcacattcccctggggacccacgtggctgcgtgcccctgctgctgtcacctctcccacgggacctggggctttcgtccacagcttcctgtccccatctgtcggcctaccaccacccacaagattatttttcacccaaacctcaaataaatcccctgcgtttttg

SEQ ID NO: 598 - DNA, 1543 bp, Homo sapiens
gacttcaaattgcaacatgggtccattctgggcttccccaaggcaaagccctatgaaggaagcatcttggaggccgactgtgacatactgatcccagctgccagtgagaagcagttgaccaaatccaacgcacccagagtcaaagccaagatcattgctgaaggtgccaatgggccaacaactccagaagctgacaagatcttcctggagagaaacattatggttattccagatctctacttgaatgctggaggagtgacagtatcttactttgagtggctgaagaatctaaatcatgtcagctatggccgtttgaccttcaaatatgaaagggattctaactaccacttgctcatgtctgttcaagagagtttagaaagaaaatttggaaagcatggtggaactattcccattgtacccacggcagagttccaagacaggatatcgggtgcatctgagaaagacatcgtgcactctggcttggcatacacaatggagcgttctgccaggcaaattatgcgcacagccatgaagtataacctgggattggacctgagaacagctgcctatgttaatgccattgagaaagtcttcaaagtgtacaatgaagctggtgtgaccttcacatagatggatcatggctgacttcctcactatcctcttcacatgtaacttctgcagacctatcacaagtttacatgtaaccacagaaatccctttctctcctgactcattaataatggataccattctcaacaagtcaatccaagtcagcccgttaaggagaaagaaattaaggttagcggatcatgtacaagctgagtgtgaaagtagaaatcacctacaccagagagccattttggtattttgcctttaaataaaaagcctcctttatctggctgtgcagccttgctctgtggcttttcccaacacaatcagtgctagtgctggggaggaacagtcaagagcagtcagttgcttgcttattttttctggatgagtctgggacacactgtaactttaacacatttaagaagtaggtgtgtggccttttcagaaggtggcatggtcctcaagtgagttcttagtattttatatcagcaaaataattcaattttgcaggttgcaaacaaatataaaacctgtttctgtttatgaatattattcttttagaatagaataagtacatgctgctgtaataaaattgcctttaatcacttaacaagcctacccttgactcaaacagtgaatgcctatagaaataataaatgaaaaaaactagtatttttatatcataaaacaatgtcatttatagcttatcattcatgtattgtccagcagacattaaaagccctgtggataattaagttatcttcatacctgcaaaatggtggaggctattttcattaaaactgtcagaatttgcttactataattatgatacagtccaaagaatgcagtcactttttatcatgttaactaattgttctcttttgaagatctatggttgactaattaaacaataattcaagtagagtgtccc

SEQ ID NO: 599 - DNA, 1262 bp, Homo sapiens
ccataacctcccctccctcacgctgggcaatgtgtttgtcatcgtgggctctattatcatggtagttgccttcctgggctgcatgggctctatcaaggaaaacaagtgtctgcttatgtcgttcttcatcctgctgctgattatcctccttgctgaggtgaccttggccatcctgctctttgtatatgaacagaagctgaatgagtatgtggctaagggtctgaccgacagcatccaccgttaccactcagacaatagcaccaaggcagcgtgggactccatccagtcatttctgcagtgttgtggtataaatggcacgagtgattggaccagtggcccaccagcatcttgcccctcagatcgaaaagtggagggttgctatgcgaaagcaagactgtggtttcattccaatttcctgtatatcggaatcatcaccatctgtgtatgtgtgattgaggtgttggggatgtcctttgcactgaccctgaactgccagattgacaaaaccagccagaccatagggctatgatctgcagtagttctgtggtgaagagacttgtttcatctccggaaatgcaaaaccatttatagcatgaagccctacatgatcactgcaggatgatcctcctcccatcctttccctttttaggtccctgtcttatacaaccagagaagtgggtgttggccaggcacatcccatctcaggcagcaagacaatctttcactcactgacggcagcagccatgtctctcaaagtggtgaaactaatatctgagcatcttttagacaagagaggcaaagacaaactggatttaatggcccaacatcaaaggggaacccaggatatgaatttttgcatcttcccattgtcgaattagtctccagcctctaaataatgcccagtcttctccccaaagtcaagcaagagactagttgaagggagttctggggccaggctcactggaccattgtcacaaccctctgtttctctttgactaagtgccctggctacaggaataacacagttctctttctccaaagggcaagatctcatttcaatttctttattagagggccttattgatgtgttctaagtctttccagaaaaaaactatccagtgatttatatcctgatttcaaccagtcacttagctgataatcacagtaagaagacttctggtattatctctctatcagataagattttgttaatgtactattttactcttcaataaataaaacagtttattatctcaatcgcc

SEQ ID NO: 600 - DNA, 904 bp, Homo sapiens
gtcatcacagggccatgcctccctccaggccgcaggagatctgagccctgcacccaatgagactgcatcccccttcgcctgcatcgtgtgctcggaggtctcagatcccagctgcagcgcaggaagggcgaggcgcgccactgcatggcttggccctcaggggtagaggcaggagacagggacagaggggcagtcagccttcacaggacagacctcaggccatctgttctcagctcctcagaaaggaggaggagggaattctcacagctgctttactgcttaaaacactgccaagctgggtttattttttttccgcaggataaaacatgaagtggcctcccctgggggcccacacctgtgaggcctttacgagcctgagctcagagctcccagcccggtgctgcctccaggtgcctgtggggtggcgtccgggccacctcatcaaaaggcctgcccccgggcacccaggcaagcggggcagggacagcgtgtcaaggtggccccgagagcccaactcaccgagagaggcagcagcgtggccacgcggtctggggtgcggcccagcaggaaggcccggctctccttgaaagggacgtccctactcatcttctccagcagcagccccaggacctgggcagctaggcgaggctccaccgccagcgcccgccacagcatgcaggtgtggctggagcagagcaggagagtcactttgaggccgtggctggtcagggcgcctgccccccgccacctgggtgccgtggaccctggctccacgacgctcagacacagccaccaggctcagctgcagccagctgggaaatggcctcttggcctcagatctgagctcaccccttcccctgactccagggatctgtaaacagagctggtaataaaggacacagag

SEQ ID NO: 601 - DNA, 1048 bp, Homo sapiens
ttcttgctagcccccaaagggcctccaggcaacatggggggcccagtcagagagccggcactctcagttgccctctggttgagttggggggcagctctgggggccgtggcttgtgccatggctctgctgacccaacaaacagagctgcagagcctcaggagagaggtgagccggctgcaggggacaggaggcccctcccagaatggggaagggtatccctggcagagtctcccggagcagagttccgatgccctggaagcctgggagagtggggagagatcccggaaaaggagagcagtgctcacccaaaaacagaagaagcagcactctgtcctgcacctggttcccattaacgccacctccaaggatgactccgatgtgacagaggtgatgtggcaaccagctcttaggcgtgggagaggcctacaggcccaaggatatggtgtccgaatccaggatgctggagtttatctgctgtatagccaggtcctgtttcaagacgtgactttcaccatgggtcaggtggtgtctcgagaaggccaaggaaggcaggagactctattccgatgtataagaagtatgccctcccacccggaccgggcctacaacagctgctatagcgcaggtgtcttccatttacaccaaggggatattctgagtgtcataattccccgggcaagggcgaaacttaacctctctccacatggaaccttcctggggtttgtgaaactgtgattgtgttataaaaagtggctcccagcttggaagaccagggtgggtacatactggagacagccaagagctgagtatataaaggagagggaatgtgcaggaacagaggcgtcttcctgggtttggctccccgttcctcacttttcccttttcattcccaccccctagactttgattttacggatatcttgcttctgttccccatggagctccgaattcttgcgtgtgtgtagatgaggggcgggggacgggcgccaggcattgtccagacctggtcggggcccactggaagcatccagaacagcaccaccatcta

SEQ ID NO: 602 - DNA, 1127 bp, Homo sapiens
gcttttttttttttttttttttttttttttttgcagttaacaccttctgtaagatgctttatttcattgaccaacaacatggggtctgaaaacccagcggggggggtctttttatcacagagccagtcccaggcgagctgatgcatctctgctcctctgcccctcaggagctctcatcctccaaccccagctgcccccacagccccaccccattcacagaaagagggctaccacgtgcctcagcccccctgcccaggctgccagctcccaggtccttttggagaaggactgatctaggcagggaggagagaaggccaacccctccagggctcactgaggaaggccaaagcctttcagaagcagttcctgcagtgacgtaatccacagcctgggatctgcatggccctgagatgcctgcggcaggctggccaaggggctggtgtgaagaaagagggcagggcccataagctgtggccaacaggggcaggggccctgcctggagtaaagtgctctggcctaggctgcgtgggtttcactgccctgcagccccagcctcccttccctctgatgccaggcacagggagcctagtcctcactggagttgtcaaactcctcccagtcagacacactcatcacctcagaggcaaagtccgggtcggcctggctgcggtcaggggtccgcggggcggctcaaggagcagggagcggggcagggtgagcacacaggccgccaggcctgagatggagttgtccagctggggcccttcctcccagcagtccttctccacatcgtaaatgtgcacgtagcctgtgcggctgccgcggttgtgtgagcggccacctaacacatagatcctgttgtccagcacagcaatgccaggctcaccgtgcccagcagggagtgggcagacagatgaccactgtccagacgtgcagctgtagcaggccacctggtgcacgtccctcctgtatccggcatcgttgttgctgcccccgatcacatacagcttgttgaggagggttgccatgccgtgccaggcgcgccgcacaggcccatcagccagtgtgtgccaagtgttgctgcctggatcgtagcagtgtgtctctttcaggtaatcctcccctct

SEQ ID NO: 603 - DNA, 1022 bp, Homo sapiens
tttttttttttttttttttctcttgctgtactacaaagagatagaatcaaactgctttttttcgacatactggtttttctttctgtttttcttctctttcttctatttcttgtggatattatggctaataacacaacaagtttagggagtccatggccagaaaacttttgggaggaccttatcatgtccttcactgtatccatggcaatcgggctggtacttggaggatttatttgggctgtgttcatttgtctgtctcgaagaagaagagccagtgctcccatctcacagtggagttcaagcaggagatctaggtcttcttacacccacggcctcaacagaactggattttaccgccacagtggctgtgaacgtcgaagcaacctcagcctggccagtctcaccttccagcgacaagcttccctggaacaagcaaattcctttccaagaaaatcaagtttcagagcttctactttccatccctttctgcaatgtccaccacttcctgtggaaactgagagtcagctggtgactctcccttcttccaatatctctcccaccatcagcacttcccacagtctgagccgtcctgactactggtccagtaacagtcttcgagtgggcctttcaacaccgcccccacctgcctatgagtccatcatcaaggcattcccagattcctgagtagggtggcttttggtttttgtttctttcttgtcttgtcttttattgaaaggaaatcaaaaataggctaaacagaattttgagggcatggcccaaataactcatgagttccaagttgaaacatggttgtgcaagttggacattacaatgtaaaacacattttcttcaaacacgttttcccttttgtttcaaaaaatgtaatattttcccccaagcgttttatatttatgtattttgtattcaatgtgaggcttattaaaaatagtgattctaatgtaagaatcagctaagatgcattatatatattttaattaaaattaaaacttcagatatttgtg

SEQ ID NO: 604 - DNA, 1572 bp, Homo sapiens
ggcttcactttctgtcctccaccatcatggggtcaaccgccatcctcgccctcctcctggctgttctccaaggactctgtgccgaggtgcagctggagcagtctggagcagaggtaaaaacgcccggggagtctctaaagatttcctgtaagacttctggattcactttcaccagctattggatcggctgggtgcgccagagacccgggaaaggcctggagtggatggggatcgtctatcctggtgattctgactccagatatagcccgtccttccaagaccacgtcaccattttagccgacaagtccaccacgaccgcccacttgcagtggagcagcctgaaggcctcggacaccgccatgtattattgtacgagattcaagggctactgtaccaataccacttgttatggcgagggcgcttttgactattggggccagggaaccctggtcaccgtctccgctgcatccccgaccagccccaaggtcttcccgctgagcctctgcagcacccagccagatgggaacgtggtcatcgcctgcctggtccagggcttcttcccccaggagccactcagtgtgacctggagcgaaagggaacagggcgtgaccgccagaaacttcccacccagccaggatgcctccggggacctgtacaccacgagcagccagctgaccctgccggccacacagtgcctagccggcaagtccgtgacatgccacgtgaagcactacacgaatcccagccaggatgtgactgtgccctgcccagttccctcaactccacctaccccatctccctcaactccacctaccccatctccctcatgctgccacccccgactgtcactgcaccgaccggccctcgaggacctgctcttaggttcagaagcgaacctcacgtgcacactgaccggcctgagagatgcctcaggtgtcaccttcacctggacgccctcaagtgggaagagcgctgttcaaggaccacctgagcgtgacctctgtggctgctacagcgtgtccagtgtcctgccgggctgtgccgagccatggaaccatgggaagaccttcacttgcactgttgcctaccccgagtccaagaccccgctaaccgccaccctttcaaaatccggaaacacattccggcccgaggtccacctgctgccgccgccgtcggaggagctggccctgaacgagctggtgacgctgaacgtgcctggcacgcggcttcagccccaaggacgtgctggttcgctggctgcaggggtcacaggagctgccccgcgagaagtacctgacttgggcatcccggcaggagcccagccagggcaccaccaccttcgctgtgaccagcatactgcgcgtggcagccgaggactggaagaagggggacaccttctcctgcatggtgggccacgaggccctgccgctggccttcacacagaagaccatcgaccgcttggcgggtaaacccacccatgtcaatgtgtctgttgtcatggcggaggtggacggcacctgctactgagccgcccgcctgcccccacccctgaataaactccatgctcccccc

SEQ ID NO: 605 - DNA, 1080 bp, Homo sapiens
gggagaagatgcctgggggtccaggagtcctccaagctctgcctgccaccatcttcctcctcttcctgctgtctgctgtctacctgggccctgggtgccaggccctgtggatgcacaaggtcccagcatcattgatggtgagcctgggggaagacgcccacttccaatgcccgcacaatagcagcaacaacgccaacgtcacctggtggcgcgtcctccatggcaactacacgtggccccctgagttcttgggcccgggcgaggaccccaatggtacgctgatcatccagaatgtgaacaagagccatgggggcatatacgtgtgccgggtccaggagggcaacgagtcataccagcagtcctgcggcacctacctccgcgtgcgccagccgccccccaggcccttcctggacatgggggagggcaccaagaaccgaatcatcacagccgaggggatcatcctcctgttctgcgcggtggtgcctgggacgctgctgctgttcaggaaacgatggcagaacgagaagctcgggttggatgccggggatgaatatgaagatgaaaacctttatgaaggcctgaacctggacgactgctccatgtatgaggacatctcccggggcctccagggcacctaccaggatgtgggcagcctcaacataggagatgtccagctggagaagccgtgacacccctactcctgccaggctgcccccgcctgctgtgcacccagctccagtgtctcagctcacttccctgggacattctcctttcagcccttctgggggcttccttagtcatattcccccagtggggggtgggagggtaacctcactcttctccaggccaggcctccttggactcccctgggggtgtcccactcttcttccctctaaactgccccccctcctaacctaatccccccgccccgctgcctttcccaggctcccctcaccccagcgggtaatgagcccttaatcgctgcctctaggggagctgattgtagcagcctcgttagtgtcaccccctcctccctgatctgtcagggccacttagtgataataaattcttcccaactgc

SEQ ID NO: 606 - DNA, 800 bp, Homo sapiens
gccctggcggcggcggcccatggggcccttggcgctgcccgcctggctgcagcccaggtataggaagaatgcgtatcttttcatctattacttaatccagttctgtggccactcttggatatttgcaaatatgacagtcagattcttttcatttggaaaagattcaatggttgacactttttatgctattggacttgtgatgcgactttgccaatccgtatctctcctggaactgctgcacatatatgttggcattgagtcaaaccatcttctcccaaggtttttgcagctcacagaaagaataatcatcctttttgtggtgatcaccagtcaagaggaagtccaagagaaatatgtggtgtgtgttttattcgtcttttggaatctattggatatggttaggtacacttatagcatgttatcagtcataggaatatcctatgctgtcttgacatggctcagtcaaacactatggatgccaatttatcctttgtgtgttcttgctgaagcatttgccatctatcaatcgctgccttattttgaatcatttggcacttattccaccaagctgccctttgacttatccatctatttcccatatgtgctgaaaatatatctcatgatgctctttataggtatgtattttacctacagtcatctatactcagaaagaagagacatcctcggaatctttcccattaaaaaaaagaagatgtgaagtacagcattccagtgtgacacgagaaaagacaggctgtggattcagtgcagtaaataaaacacaggaagtattctggtgg

SEQ ID NO: 607 - DNA, 1373 bp, Homo sapiens
gatggctgtggagctgggcgtgctgctcgtccggccccggcccggaaccgggctgggtagagtgatgcggaccctcctgctggtgctgtggctggcgacgcgcggaagcgcgctctactttcacatcggagagacggagaagaagtgctttattgaggagatcccggacgagaccatggtcataggaaactaccggacgcagctgtatgacaagcagcgggaggagtaccagccggccaccccggggcttggcatgtttgtggaggtgaaggacccagaggacaaggtcatcctggcccggcagtatggctccgagggcaggttcactttcacttcccatacccctggtgagcaccagatctgtcttcactccaattccaccaagttctccctctttgctggaggcatgctgagagttcacctggacatccaggtaggtgaacatgccaatgactatgcagaaattgctgctaaagacaagttgagtgagttgcagctacgagtgcgacagctggtggaacaagtggagcagatccagaaagagcagaactaccagcggtggcgagaggagcgcttccggcagaccagtgagagcaccaaccagcgggtgctgtggtggtccattctgcagaccctcatcctcgtggccatcggtgtctggcagatgcggcacctcaagagcttctttgaagccaagaagcttgtgtagctgtcccaggcgtcacaacccatcctcccaggctgggggagaaaggacctcctggaactgacttcttctgtcaggaggactggtttccagccatacctgttctggaagggagaggggctggaggcacccacaggcacaagctgaaggcagcagcttggctaatactgagcaggtagtggggcaaattcctgccctctctctctggcctctgggccgtttggtagtaatcacccaggggctggtaaagcccctcctcttggcacctcagaatcacagtgttactgatcagggatgtgaggctgctgttgggggtggggggaggggaatgggcaggcaagccagtcttctgtcttcctttgctaacttagggttttgagcaggttggggtatggtgcctgtcatacccacctgccaccctgggaacctcactgttctctctttcagcctagacctgctgatccagggtgtgtgtgagttgagggtgggtggaggggtttgcagtgtgggaatgtggccctgcagttgacctgagctgcttcacatggttgtccattctggggcttaaagaactgggaccagaccaagtagaggccttggtgctggttggggtggggcctgcagagtcttagttactgatttcattttcaataaatgtaggtttgtt

SEQ ID NO: 608 - DNA, 1777 bp, Homo sapiens
aaatggcggcggcggcgacggccgggcgctcctgaagcagcagttatggagcttccctcagggccggggccggagcggctctttgactcgcaccggcttccgggtgactgcttcctactgctcgtgctgctgctctacgcgccagtcgggttctgcctcctcgtcctgcgcctctttctcgggatccacgtcttcctggtcagctgcgcgctgccagacagcgtccttcgcagattcgtagtgcggaccatgtgtgcggtgctagggctcgtggcccggcaggaggactccggactccgggatcacagtgtcagggtcctcatttccaaccatgtgacacctttcgaccacaacatagtcaatttgcttaccacctgtagcacccctctactcaatagtccccccagctttgtgtgctggtctcggggcttcatggagatgaatgggcggggggagttggtggagtcactcaagagattctgtgcttccacgaggcttccccccactcctctgctgctattccctgaggaagaggccaccaatggccgggaggggctcctgcgcttcagttcctggccattttctatccaagatgtggtacaacctcttaccctgcaagttcagagacccctggtctctgtgacggtgtcagatgcctcctgggtctcagaactgctgtggtcacttttcgtccctttcacggtgtatcaagtaaggtggcttcgtcctgttcatcgccaactaggggaagcgaatgaggagtttgcactccgtgtacaacagctggtggccaaggaattgggccagacagggacacggctcactccagctgacaaagcagagcacatgaagcgacaaagacaccccagattgcgcccccagtcagcccagtcttctttccctccctcccctggtccttctcctgatgtgcaactggcaactctggctcagagagtcaaggaagttttgccccatgtgccattgggtgtcatccagagagacctggccaagactggctgtgtagacttgactatcactaatctgcttgagggggccgtagctttcatgcctgaagacatcaccaagggaactcagtccctacccacagcctctgcctccaagtttcccagctctggcccggtgacccctcagccaacagccctaacatttgccaagtcttcctgggcccggcaggagagcctgcaggagcgcaagcaagcactatatgaatacgcaagaaggagattcacagagagacgagcccaggaggctgactgagctcaaaggaacaggatggcacccagagccgcaggacggagttgccccatgtgcctttgggtgtcttccggggggtcttggccaagattggttgtgttgttttgtttttcttttttttgtttgggggggccgtagttttcatgcctgaagacatcaccaagggaactcagtccctacccacagcctctgcctccaagtttcccagctctggcccggtgacccctcagccaacagccctaacatttgccaagtcttcctgggcccggcaggagagcctgcaggagcgcaagcaagcactatatgaatacgcaagaaggagattcacagagagacgagcccaggaggctgactgagctcaaaggaacaggatggcacccagagccgcaggacggagactgggggcagccctcacccaactcacaacaggctggatgggtgggtggtaaaaagggaaggatgaggctcccccaatgtcacattaaattcatggttttcattc

SEQ ID NO: 609 - DNA, 2209 bp, Homo sapiens
cgttgcgagccttagctttctcccgaacgccagcgctgaggacacgatgtcgcggctctcccgctcactgctttgggccgccacctgcctgggcgtgctctgcgtgctgtccgcggacaagaacacgacccagcacccgaacgtgacgactttagcgcccatctccaacgtaacctcggcgccggtgacgtccctcccgctggtcaccactccggcaccagaaacctgtgaaggtcgaaacagctgcgtttcctgttttaatgttagcgttgttaatactacctgcttttggatagaatgtaaagatgagagctattgttcacataactcaacagttagtgattgtcaagtggggaacacgacagacttctgttccgtttccacggccactccagtgccaacagccaattctacagctaaacccacagttcagccctccccttctacaacttccaagacagttactacatcaggtacaacaaataacactgtgactccaacctcacaacctgtgcgaaagtctacctttgatgcagccagtttcattggaggaattgtcctggtcttgggtgtgcaggctgtaattttctttctttataaattctgcaaatctaaagaacgaaattaccacactctgtaaacagacccattgaattaataaggactggtgattcatttgtgtaactcactgaagccaaaatactatcttttaagatgtcccacatggaagacgctattccaggatctttaaatttccatggatgcatataggatgtttgggagcatcatccgtgaagaaaaaatcaattaaatcattgtgttcaacaggaatatttaaaatattctgcatgaatcctgtggctgtcttattttaaatagctgctgctgtgggattatattttttttccttaacatgccaaatataactttctgaaagtgatggaaaatgttgtcttgtgcagacaacatcatggctcttggcagtttaaatttagtaattttaatttagtgaacagaattgagaagaacgtgccaaatgagaatcaattaggtggatttttggctgtcatttcaaaagtggaataaatttattaatttagtagtactaaatggtatccttagattaaaattttgtgcttgataacagctgttttttctacattagaaataagatgccacacaaggaactacattccagatttaaagaaatgaaaggataccattagtgtgtataacagattattgttcatacttgtaaagcatcttatgtcattgagaatataaagaacagtgccttagaagacagtgaaaggtaagctctagcttaatgtctatgatttgttctttgacattaaggaaggtaaggattggtcagaggatgtaacttgatgtgagcagtagtaaacctgttttagatatcatactgttaatattttattgaaaatttatttcagagcggagaaacttaagctaaagtctgttatacagaattgaaagccttcgatcttgaacctcccaacatttttcttatggctgttgaaaagtatagagctaaattgatttaattacactttcctttgtactttaaaaaaaagtatgctagcactattgtaccttgaaaggatttccaccagactgtcttgagtagtgacttctttggtgaggcaagaaggatatacattattttagaatcatttactatttaaatgagacaatcatattattttagaatcatttattttaaatgagacaatcattttaagttttaagataacagaagtgaccaatgtaatttcacaacacctaaggattttttggttgatcaggttactgtagatttttactgattgtcctggatgaatagactgtgctttttctttttctctcccttccttcttggtttcccatagtataataagcatgcatactttaacttctatagttttctcctttagagggtcgtcttcagttttagaggtttacttctcccttgcctttgactcattggactagtgcagaggctttaagtagtttaaaatgggcttttgcttttctaggtcattaacgttttttatttagtttctttagccaatagtggctgagtttcgcacttgattttcaatattttatagtaagaaatgacaaactgctttgtttcatttcataaacaaactctgcatttagataactattaaaggttgttaagacg

SEQ ID NO: 610 - DNA, 2054 bp, Homo sapiens
cttttttttttttttttttttttttttttttcagattcctctacagtttattgttatagcagaagttgtgggagacgggagggcaccctccacacatactacagtgtggtcagagccccagggtagccctttccaccctatgccaagccccaagcagcccagcccaagcttagctccctccccagtcccactctagatgcacactgagctaccaaagttagtgcagccaaacggccccaggccccttcctgttgccccagcaccaatccttccccacactcgttcactgcccgccaactcccattccaacttcctttttacactggatgtttctatcacatcctgaggaccactaacccaccagcaagtctccccctgacacacattcacgtaggtccatacccttcagagtcctaaagggttaatgagaagccacctcagctttggtgaatggagccccagccccaaatcccctccccttgcaaatatgggacaagtagggagagtctgatggaggcaccaggacaactacaacaacctcttacccctcagctatagacacctagatcaggacagaggatgcatatgccctctccaccttaacatcaaaatgggggaggaggagaatttaggggtctgggtccctaagagatattaggacatctcttccaggagctggggggaatcacgggttaaaggtcaaggttagggtagcaatcaaagatcaaggtcatctccccgcatgatctgccctttttcccttgcttacggtggcccaatgccccttcagcacctcccaggttagctctgggggaggtgagggctgggtcccactctagggcaacaagggccattcaacaggagacctccatggtgtgccccgggggccccgaagaaagagttccagactcgctgctctgggacagggtgcgagagcgggaccggttgccatcaacggatgctgcactggtcagagaggctgtacgagaccgggacaggcgagtcatgcaggatgaggccatgtagcccatgccttgcaggaagtacttgaaggcctcggtcagcttgcctggctgagtcagctggggctgacctccggagtcagccatcttgaggaacgaggtctgggtggggtccagttttgagttacattccaccactgcatcttcatgaggtgcttggtctcctaccaccagcatcacaggacacctgagggtgatatcacctccacgctcaaagttcaggtctcggcggttgttgtagctgttccagtacaattcaatgttatccaggttgggtgcatgtgtaatgatatttctgtacttttgtatcaactcagaatttccagagagctcttcctggctgaaaagatgtccaaggatcatctccggaatggaagaggtgaggcctgttagcttgtgggctgcccaatccatccaacccttggcattgggatcaatgttgatgaggacaagaccttcaacagtgtccgggtggttaagagcatatctcgccaggatgtaggctccagctccaacaccaactccaattattgtagagaaatttaggtactgcaggacgcaagggatcatgtctgcaagctggtccagagatgggtactgatatcccaaagggaacacaggggctccctcttccattccaggggcatccacatgaacccgcacaaagttctgaatgatttcctgcatgtcctcgaactgaaacagtggctggaagcaagatttatagttgagtcccacatcgtggtaggtaaggatcgctgggcgtttgggtttgggggtgccatagacagtgaaagtgacagagccgtatggtgtctccacagagtgagtctgtccctggtccaggaggattcgggcagctaactcagcctccttggccgcctcaggcgtctgtcctggcaacagtggcttctcctctgtgatctgcacctcctgcagctccgccatggtggctgggctcctattggctggatgcagtgggattaggggtcagggttctcactccttctgactctggggtctgctgccgcc

SEQ ID NO: 611 - DNA, 1288 bp, Homo sapiens
tgcaaactagatagaaacctttatttcacaactttatcatcattcacattctaaaaagacacggactgggggacacagctgaaaacagtgggaggccagatgctggcatcttccagacgggagcatagccatggtcactctagccgatgtctcctggggctctcaggcggcaaggaccagatgcaccactactgtccaatcccagttttacttagagccacctccttttttggggccattagtccttatttcatgccagattttcactagcggctccctgttcttccaaatcagttcatgaccgtaagtaacataccatattccaaaaagagctcccccaagatgtgccgcatgatcaaaaaatttccatcccaggatcattcctgctgtatccatggcgataatggctttcagggcattccctgctgtgaacgtgaacatcggaaggaaaataatggcaagcctcccttctgggatcttagtgcagacagctgcgaggactgtcatgatggcaccagactgcaaagtaacatgcaccaagtgatggtccatatcttcctgtggcaactttacccaggtaactgacaaaattggaaataacacctgcagataggtacactgccatgaactgctcttgacccagaatgttcactatgctggaagagaagctccacaaaacatacatatttgctgccatgtgaaataaggagaagtgactgaatgttgacagcaacattggagaacaaaggacctttgaggctggattcgatgtgaaatatctgatcattgtccgctgcagagaaggtactctccataaacagaatacaaggacatttgcagctataatacctgtcacagtccgctggccatcacttaggttattccaccacttgttaatctcctttctgaagtctccttctttttgtggtcttatgctatccaaccaatcagcttttataccatcaaaataactctggaccctggatttcagtgattcatattgccaaatagcagctgatccaaatgcacagcctgtaaacccaacagtaaaaaataaaggttttatgagactccttataggatagggagaaggataaaagactgtttcttccacaggaggaatcaaagcacttctcttgtatgcttcaccacttgtccctgggtctgatcttcgaggttcaaccttcctgggtgcttttctgaatccgcatttttgttgaataaagaagttaaacctgcgtccgaggagctgcggcggggttaggaccgcagtgagctcctcgcagct

SEQ ID NO: 612 - DNA, 1708 bp, Homo sapiens
acataacccagatagaagatgccaccgagaagctcaaggctaatgcagagtcaagtaaaacctggctgaaggggaaattcactgaactcagattactacttgacgaagaggaagcgctggccaagaaattcattgataaaaacacgcagcttaccctccaggtgtacagggaacaagctgactcttgcagagagcaacttgacatcatgaatgatctctccaacagggtctggagtatcagccaggagcccgatcctgtccagaggcttcaggcatacacggccaccgagcaggagatgcagcagcagatgagcctcggggagctgtgccatcccgtgcccctctcctttgagcccgtcaagagcttctttaagggcctcgtggaagccgtggagagtacattacagacgccattggacattcgccttaaggaaagcataaactgccagctctcagacccttccagcaccaagccaggtaccttgttgaaaaccagcccctcaccagagcgatcgctattgctgaaatacgcgcgcacgcccacgctggatcctgacacgatgcacgcgcgcctgcgcctgtccgccgatcgcctgacggtgcgctgcggcctgctgggcagcctggggcccgtgcccgtgctgcggttcgacgcgctctggcaagtgctggctcgtgactgcttcgccaccggccgccactactgggaggttgacgtgcaggaggcgggcgccggctggtgggtgggcgcggcctacgcctcccttcggcgccgcggggcctcggccgccgcccgcctgggctgcaaccgccagtcctggtgcctcaagcgctacgaccttgagtactgggccttccacgacggccagcgcagccgcctgcggccccgcgacgacctcgaccggctcggcgtcttcctggactacgaggccggcgtcctcgccttctacgacgtgacgggcggcatgagccacctgcataccttccgcgccacgttccaggagccgctctacccggccctgcggctctgggagggggccatcagcatcccccggctgccctaggggccaggaccggcgtgacagcctccaggtacgccgcagctgcccagtctcgcctaatctacctagatcagcgtggctggtccccttactgcctgcttcttagggccctctccctgccccagctttccccgaccaatcacgcctacagtgctttgaaggtttcctctcctaggctagtttcaaacaggccctaaacaagtctgctgctgccctctcatcagacctccgcaccctcaccccaccatcacttacactactttaatccagttccttcaaagtgatacccccacaggtaagccctcagcatcctgaatacatcatccgcagcctgggaaccttctccctcgtacagcacaggaacctgacacatagtaggcacacagtaaacgtttgtgaatgaatgggagtcatccagtcctgactcttctgtctcttgaggtcccttgaatcttccgcttcctccccaccgatttcagcgtgtccacatcacagctccctccagaagctgcaagagcttcttagcagttcctggtctgaaccctctcccagtcctcatcttccaccctaaaactagagtgatcttcctaaaacttcacttaacccctcagctatgaaaaggcttccaggagtttccatgaaataac

SEQ ID NO: 613 - DNA, 2617 bp, Homo sapiens
tttttttttttttttttgcaaataactaaaatacctaaagcaaattaatagtaattcctaaatatcatcaaatactcaatattcaaattatctcacaagtgccataattttaaaaatcccaatctaaatgaaagccatacattggaattgtttaagatgagctgtatgtgttctaaactattgtttccccttctgtcttatttttttcttggaatttatttgttgactaaaccagattgattgtcctgaagattttcctacttcctatagtatagtatggacaaatttcatcctacatcatttaatcatacatttctcttctcagtgttttcaataaatcagtagctggatcgagaagcttgaagaatttcaggtttgatatttgtttttgtataagtatttcacagaatgtatatcaagaagacttttaattaataaaatatacgaatgctaataaagttagaagccagagaagaccagataagaaaagtagataagaaaaaactcatattgttctgtttcaacatgtgtaagaatattaatcaccttttcaagagtcctgttatatttcataacaacattaaatcaactattttaaataatgtttttttcactctgtcttttcggattattatgctaaatggattttatcataaagaatttaaggcaacttcaagatggatattcagtttaaattcaaaacatatttctaggataataacttattatcacagatggcaaaagcagaataagattaactgaattcaatgtcagaaagcagaagcaaccagtattgtcaaataagtggcaaggaaaaaaaatgatgaaagggaaccctattatttaaggcagaaaatcataggtgtgacacataggatatgatttataaatatttgttgaataacaacagacttagaatgaatggactatcccagtgtattaggctgttcttgcattgctataaagaaatacctgagactgggtattttataaagaaaagaggcttaattggctcacggttctgcaggccgtacccgaagcatgtgccagcatctgcttggcttctggggaagcctcagggagctttcaatcatggtggaaagcaaaaggggaagccagcatctcacatggtgggagcaaggttgggtggaaggaggtgccacaaagacaacaccaagccatgagggatctgcccccatgagccaaacaccttccaccaggccccatctccagcactggggattacaattcaacccgagattggagcccaggacaaacatccaaactatatcacctagggtgcttatgaagatgcctgagttcagtaaacaattctgtctccttctatgagaaatgacaggatgaatgatcaagaatgatcacaccactaacattatgtgccttcactccaatcttttcctgtgtttctccagagaggaaaagcccctaatcctccaactccaattatttagttgttaataatttaacaaattatttccatccctctgctcccttgacacattgctcatgacaccggactacgtattcaattatttccccaccctgtcattcttagctctctctttccacagttcatcttccttctaacccattccagtccattcttaggaagaaagaaaccaaaattctattttgtcttaggtattttgtctcccagaagtagatcctgatgcaaggatttggttgcaagtaggttatcctgaggtgaccccagaaggcaccaagagggaagttgagaagtgagacagagaagggatggaaggcaatgaaaggtgttataaagtacaagtccttcactatgggcaactggggctgaatcctgcaggggattctggaagactgtatgcaatgtgcttcagggttgtaccaattcaagggcaagaacactaaggcacgtattaaaaaatctccatctattattttgttgcctcttccctccagaaacatttgtcctttaattttcaataaagtgtcctccaagttttctccctgcatctcacttatcattcttcagcaagacaatagatccctcccatcatgcattaaatgtttctgtttttcaggaacctgatttgtctgtgcatctctccctgaacaagcacatctcctcccttggcttcaatcatcccccaccccacccccggcctggtgacatgtacttctctcttttcagagcccaaactcattttccttaggtaaagtgacatttccacctaaatagttaagcaggctcctcaaactcagtatgttcaaaataaaattcagtaactttttcttttcatcactacactggaaattattttaaaaataaaacaatttctccatcctaatactcttccattaatgagtcactttccatctggtcacacaagctagacccttccatatcatctttgcttcttcctcttccttatttcccacattaaatttgtcatcaattccatccctttcttatgtcggtcccacgttcctattgttcagactactcccattgctcagattctcatctgtatcctcaactctagtgatttttactttctccagcttccaaatgatcctccatgccactgcctctgtgtgtgtacgaccttagaaa

SEQ ID NO: 614 - DNA, 595 bp, Homo sapiens
ttttttttttttttggtgcttaaaatgaaaattcttattaaaaaaatcaaaacaaaaaaattaaaataaaaacaaaaccagcgagaattaatacctggggttggtatggcagggtatgtacagggggaaccccccgcccctgtcccaccccctctgtcaccaaccgaggcaggggggaggttgaggttccccagctggggagcaatggcttgtgagttctgaggatgggggagccaagtcctggcgtttgctggtgatgaagatgtggtgagctgggcagaggggtgtcttgatgaacacgaggcccccaggacccatcctgagacccaggaccaggggcctcactcagttcctggcctcggcctctgacgtcagcccaggctgtgggagcaggcagtccactgagggcccaggcctctgtccaaggagtcgctgcctcctccctccccgtcccccagggaaggtccccagtactgcccgggagggcaggtgggggcagggctggtgcggggtcacatggtcggtagaaaggcagagaaaagccggggcggagggcgagggctgtgtccatgtggcgtgggcggtcacggggaaa

SEQ ID NO: 615 - DNA, 765 bp, Homo sapiens
acattcctgctcctggcgctcagcaccgctgcccaggccgaaccggtgcagttcaaggactgcggttctgtggatggagttataaaggaagtgaatgtgagcccatgccccacccaaccctgccagctgagcaaaggacagtcttacagcgtcaatgtcaccttcaccagcaatattcagtctaaaagcagcaaggccgtggtgcatggcatcctgatgggcgtcccagttccctttcccattcctgagcctgatggttgtaagagtggaattaactgccctatccaaaaagacaagacctatagctacctgaataaactaccagtgaaaagcgaatatccctctataaaactggtggtggagtggcaacttcaggatgacaaaaaccaaagtctcttctgctgggaaatcccagtacagatcgtttctcatctctaagtgcctcattgagttcggtgcatctggccaatgagtctgctgagactcttgacagcacctccagctctgctgcttcaacaacagtgacttgctctccaatggtatccagtgattcgttgaagaggaggtgctctgtagcagaaactgagctccgggtggctggttctcagtggttgtctcatgtctctttttctgtcttaggtggtttcattaaatgcagcacttggttagcagatgtttaattttttttttaacaacattaacttgtggcctctttctacacctggaaatttactcttgaataaataaaaactcgtttgtcttgcc

SEQ ID NO: 616 - DNA, 316 bp, Homo sapiens
ctccctcagcaccatgtaccgagcacttcggctcctcgcgcgctcgcgtcccctcgtgcgggctccagccgcagccttagcttcggctcccggcttgggtggcgcggccgtgccctcgttttggcctccgaacgcggctcgaatggcaagccaaaattccttccggatagaatatgatacctttggtgaactaaaggtgccaaatgataagtattatggcgcccagaccgtgagatctacgatgaactttaagattggaggtgtgacagaacgcatgccaaccccagttattaaagcttttggcatcttgaagcga

SEQ ID NO: 617 - DNA, 1811 bp, Homo sapiens
aagaggggagagtggcgggccgctgaataagcttccaaaatgatgcccacaccagttatcctattgaaagaggggactgatagctcccaaggcatcccccagcttgtgagtaacatcagtgcctgccaggtgattgctgaggctgtaagaactaccctgggtccccgtggcatggacaagcttattgtagatggcagaggcaaagcaacaatttctaatgatggggccacaattctgaaacttcttgatgttgtccatcctgcagcaaagactttggtagacattgccaaatcccaagatgctgaggtgggtgatggcaccacctcagtgaccttgctggctgcagagtttctgaagcaggtgaaaccctatgtggaggaaggtttacacccccagatcatcattcgagctttccgcacagccacccagctggcagttaacaagatcaaagagattgctgtgaccgtgaagaaggcagataaagtggagcagaggaagctgctggaaaagtgtgccatgaccgctctgagctccaagctgatctcccagcagaaagctttctttgctaagatggtggtggatgcagtgatgatgctcgatgatttgctgcagcttaaaatgattggaatcaagaaggtacagggtggagccctcgaggattctcagctggtagctggtgttgcattcaagaagactttctcttacgctgggtttgaaatgcaacccaaaaagtaccacaatcccaagattgcccttttgaatgtcgagctcgagttgaaagctgagaaagacaatgctgagataagagtccacacagttgaggattatcaggcaattgttgatgctgagtggaacattctctatgacaagttagagaagatccatcattctggagccaaagttgtcttgtccaaactccccattggggatgtggccacccagtactttgctgacagggacatgttctgtgctggccgagtacctgaggaggatctgaagaggacaatgatggcctgtggaggctcaatccagaccagtgtgaatgctctgtcagcagatgtgctgggtcgatgccaggtgtttgaagagacccagattggaggcgagaggtacaatttttttactggctgccccaaggccaagacatgcaccttcattctccgtggcggcgccgagcagtttatggaggagacagagcggtccctgcatgatgccatcatgatcgtcaggagggccatcaagaatgattcagtggtggctggtggcggggccattgagatggaactctccaagtacctgcgggattactcaaggactattccaggaaaacagcagctgttgattggggcatatgccaaggccttgagattatcccacgccagttgtgtgacaatgctggctttgatgccacaaacattctcaacaagctgcgggctcggcatgcccaggggggtacatggtatggagtagacatcaacaacgaggacattgctgacaactttgaagctttcgtgtgggagccaggtatggtgcggatcaatgcgctgacagcagcctctgaggctgcgtgcctgatcgtgtctgtagatgaaaccatcaagaacccccgctcgactgtggatgctcccacagcagcaggccggggccgtggtcgtggccgcccccactgagaggcaccccacccatcacatggctggctggctgctgggtgcacttaccctccttggcttggttacttcattttacaaggaaggggtagtaattggcccactctcttcttactggaggctatttaaataaaatgtaagact

SEQ ID NO: 618 - DNA, 872 bp, Homo sapiens
ttttttttttttttttttttttaatacaacgtttaatcatctggttgatcaagaaatgcaatgctcagtctaggaacagcagcagaaatagcgagagacacgggacttttatacaaaaaaatttgttgcttacaaaacatatgcaaaaaaagcttaaaaaaaccagagaccaaaggcagcatccttgctaattttcatctacattaagaaaaaaaaaatcttgtaactaatgtttttattttccttaaaaaaaatatttcgcttaggcacaatttgctggtggctttagaagaataagccaggtttccacagcatcccccttgagtgatatgtttccatttctccgctttttatagttaaggcatttttttcttctctgacaaagtgtatgttttgttgcttgctttcaggttttgtttactttcacatgtgcccggcggggttgtgggcttcgctcaggcctgggtggggagctgaaagcaccatctgggggtctccaaccacacctgacaccttttcctcttctcgccgtttcaaacaggctgctttgggattcaggttccgctctcgcacttgctgctccaagttcaggatgaccgagacagcctggtgcaggatgagcagtttggtctggggcttctcgctgttgaggtgcagttggcacatgcgccccagctccttaaaggcctcgttgatgtcacggacccgcagccgctcccgggcgttattggccacccggcgctccttctcccgctcggccttctgctctggtccgggcccggggggccttcagctccttcttctcctcctccgagtggtcagccgctgacgtgttctcctcgtcctccttctcctcccgcttgatctcgctg

SEQ ID NO: 619 - DNA, 1115 bp, Homo sapiens
gccgcttttttttttttttttttttttttttttttaagttgaaaaataccttgtttaagacctccctgggacccacaggggcacgtgtggccgtaagcctgtggcagcccaatcgttagcctttttcttctttgagcctctctaagtacatctgcagggacttctggatggagtctttggagatgaagctgacgaagttctgcacgtccgcatcgcgctgcgtgaccaggcggctggccgtggcctttcgcatcatggccttggtcagctgtcgagcatggtctggaatggccatccactgggctatcgctgacagcgcagtgctctgcacctgctcctccgggaccacctggtccactatgcccacctgcagggcctccgccggcgggaagagcagccccagctgcagggcacgctccgccgcccggtgcccgatggtgttctccagggtgtctttcaaccagaaaggggcgatgatgcccagctgggtctcattgagtcctatgcagtacctggggttgtccgccaggatgcggtagtcacaggtcagggccaccaggcagcctccagcggggcaggctccgttgatggcggagaccagcaccaggttggactggtacaaccgcagccacagctcctgaacggccttccagtacccagcgtagtgggcggggctcctcccacacatctccgtcaggtccaggccggccgagaagacacccgggcggtccgaggtcagaatgacaccgcggaagctcttgtcattctccagcttctccaggctgatgaccagctccgtcagaaactccaggctcaggctgttcactggggggttcttgaatttcatcacagcgacccctgcgcccgcgtccggctccaccagcacccgctggctcccgaagcgccgcgcgccgtctccgccgccggccgcccgctccgtccgcccgagggccgcgcccgggagccgggcccctgcgaaggcagcgtgggggagcccgttagttcccggtcctggccccggccccggcccgatccctgcccaccccgggtttcgcacccgcgcggagcagaacgcgcgccgggactcgcacagaagccaccagcgcccttagaaa

SEQ ID NO: 620 - DNA, 1888 bp, Homo sapiens
gaagaacaaaagctttactcgtgctcggcaacagcaaagcaggaggcagaggggagatgacggcccctgtcccatttccctccatggaaggcaccaggcggggaggtgggtctgctgggatgggcaggtcagcggaacaaaaggctcctgttgtttatgggcccaggcacagtggggcaggagcacgacccagaaagtagtcctgagccacaagtcagagcggagaaaacatctctgtggtcccagtcaagaggcctccgaatgaggcgcctggactgggagcaaagctctggtcgagaacatgaccttcccgggcctgagtcccactgtggtgcccggccgtgcacccagcctgcggcagagagggcggcgtcccccacaaagcctgccaggctgagcccttgcaatggccgtggctgggccaggaccttggcctggagcctgctccttgacacccagccagcctagcacccgccttcagcaacaggtaatggagcccggatggcagctccctcccaggtgcgcaagtgctggggtggaagcctgttcccgtgggatcaaccttggggctgggtcggggggaggggcactgcggccctggccatcagcctggctgtcttcgttctcccaaaacacccatcaccgcacccaccaagggctgggaaaagggggggcttgcaggctaccagaaggtctgcaggtgcctgcatctcactggtgcggccgtggcacctgagggagcccactgagcccatagggggctctggttccccgcgcctgggacagagccagcagccctgggtcggggtggttggtgtcaccgagaggtcgggcgccctgtttctgcctgggacaccagtccgtgtctgggtacagaagacaatggatagactttaacccgtgtggggtcttgatgcaggcttaagcctccagccacgttcaccacgttctgtgggttctcaggacccccatggctcaaggtaacctgctggacagggtgtcgggcggcagcctctgcaggttctccaggtagagtggaagagggggcttgtgcagcaggcgggcgcccaggagcccctccacgatgtagccaacttgtgcagtcatccggcagccgcacctgctcagctgtgctcatgaagctgcccaggctggggggaggccggtcagcacctttcaggtctcagcctccgcctcccagcccgggcagctggacccccactcacctggcccatgggctcatcttgagggcaaggcctctgctgaggcagaacccggccccaccagtagcaaaccagaacttgaccgtggtcacagttctgccaccctggaccctctcggtggcctcaatggggtggtccaggctgggccgccccaggtagacgtcctggctgggtgagaagctggagagcaggtgcaggaggctccttgcgttcacataattgtcatcatccacgtgcaaaaccacttgcgcccggaactcaatgaacttgtcatactccacggacatcttgcagcagagggcctgacgagtgcgcaccgccgagcagttggtgttgatgacacggtcgccgccctggagctcgagctcagggtcgtccccgtcggtgaagataaacgtctgctggcgggcccgggagatccaggtgcgcagcagcagccgcaggcgcggcccgtggttcttccgggtggtcttgacggcgatgaagacgtcgtcaggccgcaggctgggggcagcgggccgggacgggggcgcgcgcggggccggggcgggggtccgggccggggcgggcgcgcggggcagcggcagcggcagtaacagcagcgcggccagggccgcggccagcgcgaggcaggcccggcacagcgccccacgcgcgcggctcat

SEQ ID NO: 621 - DNA, 1903 bp, Homo sapiens
cttttttttttttttttttttttttttttttgggctgcagcatttattacatgtgctttggcgaaaataaataattcttcacacacatatttcagcaggccatgaaaaacggggagggaagggcagctgcaaagttcccaggagtaaaggggcgggggaggtgctcgggcagcacaggggagggaagattaaggcacaggtgcgcggggcctcagcggcccaggggaggggtgtggaaacctcccctctcagtgcagctggtgagtggctggcgagggggcccacggcaaagacccctcttggcaactgtgagtcccctcatctcactgcgcagtggtaatggaggcgtctcaggcagggttcctcgagagggtcggggtctcacagccccagggccccgatcacgggccgggcctcgggagcaggggtgctcagcaagggggcaggcccggccggctggtgctgcggggatgctgggtccgcgggggcgggagccgggtcggcgggtgcgcgcatgcgcagagcttcgggcgggaaggccacgttggtgcagaagaggccgagcagcagctggcgctggcactcctcccacttggccagcgcgtcccccagcgagaggttgttgcgcatccagccgggcagtgcctctctgtaggcggcgcaggacagcggcacggacggcagcgactggacgcggcgcagctccacctgctccggcagcctggagggcaggtgcctgcccagcttcctcttggcgcgcatcaccaggtactggcagatgctgcccgtctgctccttcatccaccggatgtcctcgggaacgtcgggcagccactccagcaagcggatggtgaaggacagagcgctctccagcggcagcgtgtagggcaccatcatggccgtggccagacgcacaggcagcatgttggagagggtggtcagcaggtccgtgggctccacgcaggcctccagcagggcctcattgagccgggcgggcaggtgctccaggatgtgatcttctccgggcagctgcgagtaatcctccgcttgggcgctctccactgcctggtccttgtcctctgggccgtgggggcgggcggggggcaacgccagcaaggggttgggccggttcaggaggccgttccgctgcagaaagcgcaggccatcccggtatccctgcttgcacatctctcgcagcaccaggggctccggcgggaagagggccttggagaggcggtagaggttgcgcaggttgaactggatgctggtgttggtgacccgcagctcgtggatgttggtggagctgtcctgcggacagatgtcactctcgcccgagaagggggacactgtgatggtgttcttaagctcatagagtggcaggttgtctgaaatgccaccatccacgtagcgcaccccctggagggagggagggatgagcccacagtacacggggatgaaaccgctgcagacattggcctggatgagctcgtccttggagttgaagtgggatataatgacattctcgccgtctgacacgcgggtcagggagatgcccaggcgcccactggcatgctcatggctatcagcaggcaggaccttcagcaggaaactgcggatgatctttaccaggttgaaggaggggtgcagggggcccaggaaccgcttccgggcctctttagatacctcaatgaacttggcaccagcctcacccaggcagaccccggtgaccagcgccgtggccgtgagcgccccggccgaggcgccgtagatgtgcgtggcgttggccaccaggaagggcgcgtgctcgcggaggcaggaggccacgccgacgtagtagacgccgaggaagccgcagcccgcgaacgagatgttccacgtcttctcgcggggaaacatcgcggcg

SEQ ID NO: 622 - DNA, 1519 bp, Homo sapiens
cccgggttcaagcgattctcctgcatcagcctcccgagtagctaggattacaggcgcccgccactacgcccagctaatttgtggtatttttagtagagacagggtttcaccatgttggccaggctggtctcgaactcctgacctcatgatccgcccgccttgacctcccaaagtgctgggattacaggcatgagccaccgcacccagcctgcattcctgtttttttaatggttttggagggtagcagtagagatggggtctcactatgttgcccagtctagtcttgaactcctgggctacagttaccctcctacctcggcttcccaaagtgctcggattacaggtgtgagccactgtgcctagcctataatgatcattttaatgtttcccatgcactcatttagtttgaaccttcacagcaacccaatgaggtaatactcccatttcacatataatactgagagatgagttgcacaagattatacactgttaagtagcagagccagaatggacttcagaatcccaactacaatacaaatgtttatttaaataaagaagaaagctattgtacaaatatcactcttcaggtttagcttacagagccatggctatggattcttagctctgtaaggaagtgcttctataaattcttaggtttagagatgataccatctgggtctagtaggtggatcccatccagttggtttccaagggtgatcctgaaacagtgtaaaaggaggggcaaaccagaaatcctggaattagagggtttaatattgttaaaaaatgcataccaaatgaagactgcctatcatcatatcaaatatgccaattctaaaaagagcttaacattagaatagtatatggtagaattactagttcagaattggcatagattctggtgttaaaatagactggatctgtattatctgagggttagtaactaatgcttagccaggcctgcttcacagagttgctaccagggagtattctttggataagcaaaatgctagcagcatgtgttttaagctctgttaaggggtgaaagatgtaattattgacagattaaatagataacttcgtaaccaccagggggcagattcaatacatcacagaatggctgaggaagatccttgggttgtgaagagagtagaaaccctagggagcagtgcttttgggtcctagaacctgttgagtttctaatgaatatttgtagaatctcataaaacagtttaaatacaagcttaagtggcttatgaatcctgtgaagctcatttatggactagtgtaaaacaatgtgaagctctactaagttctgtccttaatcataaataatagacccttgaggactagcctgttctctggtcaccttaccagttgggttgcacattgtgtggtcgtccaaataactcaatcttgcgagtgccaggagatagtctttcaatcatgccatagatttcatctggtttatgactggtggaacgaacctaggaaataaaaactagctgctttttaagtt

SEQ ID NO: 623 - DNA, 1014 bp, Homo sapiens
aacagactagctctctagtacctccatatctcggaatgatactgaccgcattgctgcaaggcctggctggaagaacgtgggcaggaaaggaggagctattgaaagccattgcctgtgtggtgacagcttgcagtgcagagctggaaaagtctgtgcccaatcaacccagcacaaatgaaattcttcaagctgttctgaaggaatgtagcaaagagaatgtcaaatacaagattgtagcaatcagctgtgcagctgatatcttgaaggccaccaaagaggacagattccaggagttctctaacattgtcatacctctcatcaagaagaactcacttgaaagcagtggggtccggacaaccaaaaatgaagaggagaatgaaaaggaaaaggagctccagctggaatatctgctgggtgcctttgaaagcctgggcaaagcctggccgcgaaacgcggagacccaacgttgttatcgtcaggagctgtgcaaactgatgtgtgaaccggctaaactcagcacgtggaaagtgcagctaggagtcctgcaatcaatgaatgcctttttttcaggggttaatgcttttggaagaagaacatgccgatcctgaggctttggctgaaattctgcttgaaacttgtaaatcaatcacatattctttagaaaataagccctactcatctgtgagaacagaagctttatctgtgatagaatggctgcttaaaaaacttgaagaatctaaacagtgggaatgtttgacatctgaatgcagagtgctcctaattgagtctttagctactatggagccagacagcagacctgaactgcaggagaaagcagcgttactgaagaaaacacttgaaaatctggaataaattagaaggggaagaaacaaacaagtgccatgttcattgggggttgaagtggtggtgttctttgaaaaaccaagtgggaaaaagtaaagattaatctgtagcatgcatcattccttggctgaaataaaaagaaaaagcctt

SEQ ID NO: 624 - DNA, 1573 bp, Homo sapiens
cttttttttttttttttttttttttttttttgaatggatctttttatttctaattttataagatgcaacatctcaccccgttgacacggttagtttgcatgcacacacagagcggccagccgccccgagcctgtgggcaggccagcagggtcagtagcaggtgccagctgtgtcggacatgaccagggacacgttgtacagggtgggtttaccggtggacttgtccacggtcctctcggtgaccctgttgggcagggcctcatgggccaccacgcaggtgtaggtctcccccgtgttccattcctcttcggacacggtcaggatgctgtgggcgaagtaccggcctggggcctggggctcaggcattggggcgctggtcacatacttctccggggacaagggctgccccctctgcatccactgcacgaagacgtccgcgggagagaagcccgtcaccaggcacgtgatggtggccgactcccgcaggttcagctgctcccgggctggtggcagcaagtagacatcgggcctgtgcagggccacccccttgggccgggagatggtctgcttcagtggcgagggcaggtctgtgtgggtcacggtgcacgtgaacctctccccggaattccagtcatcctcgcagatgctggcctcacccacggcgctgaaagtggcattggggtggctctcggagatgttggtgtgggttttcacagcttcgccattctggcgggtccaggagatggtcacgctgtcataggtggtcaggtctgtgaccaggcaggtcaacttggtggacttggtgaggaagatgctggcaaaggatggggggatggcgaagacccggatggctgtgtcttgatcggggacacacatggaggacgcattctgctggaaggtcaggcccctgtgatccacgcggcaggtgaacatgctctggctgagccagtcgctctctttgatggtcagtgtgctggtcaccttgtaggtcgtgggcccagactctttggcctcagcctgcacctggtccgtggtgacgccagaccccacctgcttcccctcgcgcagccaggacacctgaatctgccggggactgaaacccgtggcctggcagatgagcttggacttgcgggggttgccgaagaagccgtcgcggggtgggacgaagacgctcactttgggaggcagctcggcaatcactggaagaggcacgttcttttctttgttgccgttggggtgctggactttgcacaccacgtgttcgtctgtgccctgcatgacgtccttggaaggcagcagcacctgtgaggtggctgcgtacttgccccctctcaggactgatgggaagccccgggtgctgctgatgtcagagttgttcttgtatttccaggagaaagtgatggagtcgggaaggaagtcctgtgcgaggcagccaacggccacgctgctcgtatccgacggggaattctcacaggagacgagggggaaaagggttggggcggatgcactccctgaggagacggtgaccagggtgccctggccccagtgttcgaaaagggacgaaccttagaaa

SEQ ID NO: 625 - DNA, 1900 bp, Homo sapiens
attcggcctcggcctcgctgtcttctgcagccgctactggaacctccacctcgactccagcggccccgacagcacggaagcagctggataaagaacaggttagaaaggcagtggacgctctcttgacgcattgcaagtccaggaaaaacaattatgggttgcttttgaatgagaatgaaagtttatttttaatggtggtattatggaaaattccaagtaaagaactgagggtcagattgaccttgcctcatagtattcgatcagattcagaagatatctgtttatttacgaaggatgaacccaattcaactcctgaaaagacagaacagttttatagaaagcttttaaacaagcatggaattaaaaccgtttctcagattatctccctccaaactctaaagaaggaatataaatcctatgaagccaagctccgccttctgagcagttttgatttcttccttactgatgccagaattaggcggctcttaccctcactcattgggagacatttctatcaaagaaagaaagttccagtatctgtaaaccttctgtccaagaatttatcaagagagatcaatgactgtataggtggaacggtcttaaacatttctaaaagtggttcttgcagtgctatacgtattggtcacgttggaatgcaaattgagcacatcattgaaaacattgttgctgtcaccaaaggactttcagaaaaattgccagagaagtgggagagcgtgaaactcctgtttgtgaaaactgagaaatcggctgcacttcccatcttttcctcgtttgtcagcaattgggatgaagccaccaaaagatctttgcttaataagaagaaaaaagaggcaaggagaaaacgaagagaaagaaattttgaaaaacaaaaggagaggaagaagaagaggcagcaggctaggaagactgcatcagttcttagtaaagatgatgtggcacctgaaagtggtgatactacagtgaagaaacctgaatcaaagaaggaacagaccccagagcatgggaagaaaaaacgtggcagaggaaaagcccaagttaaagcaacaaatgaatccgaagacgaaatcccacagctggtaccaataggaaagaagactccagctaatgaaaaagtagagattcaaaaacatgccacaggaaagaagtctccagcaaagagtcctaatcccagcacacctcgtgggaagaaaagaaaggctttgccagcatctgagaccccaaaagctgcagagtctgagaccccagggaaaagcccagagaagaagccaaaaatcaaagaagaggcagtgaaggaaaaaagtccttcgctggggaaaaaagatgcgagacagactccaaaaaagccagaggccaagtttttcaccactcctagtaaatctgtgagaaaagcttcccacacccccaaaaaatggcccaaaaaacccaaagtaccccagtcgacctaaagtcagtgattcaactggaaggaaacctcaatgctgcctccagagctttttggaaatactcagatcctggccgcctttgtaaccttctctaaacgtcaggcctggacttaaaagattttttaaaacctccataagtagtccaggggcggtggctcacgcctgtaatcccagcactttgggaggccgaggcaggcggatcacaaggtcaacgagatcgagaccatcctggccaacatggtgaaaccctgtctgtaccaaaaatacaaaaattaattgggcatggtggtggacacctgtaatcccagctactagggaggctgaggcaggagaattgcttgaacctgggaggcggaggttgcagtgagccactgcactccagcctgatgacagagcaagactcagtctcaaaaataaataaaaataataaaccctcc

SEQ ID NO: 626 - DNA, 21 bp, Artificial Sequence
  linker sequence
gaattcggccaaagaggccta

SEQ ID NO: 627 - DNA, 21 bp, Artificial Sequence
  linker sequence
gaattcggccttcatggccta

SEQ ID NO: 628 - DNA, 8 bp, Artificial Sequence
  linker sequence
  unsure (7)..(8)
gaattcnn

SEQ ID NO: 629 - DNA, 15 bp, Artificial Sequence
  linker sequence
  unsure (1)..(9)
nnnnnnnnnctcgag

SEQ ID NO: 630 - DNA, 15 bp, Artificial Sequence
  linker sequence
  unsure (1)..(9)
nnnnnnnnngtcgac

SEQ ID NO: 631 - DNA, 24 bp, Artificial Sequence
  linker sequence
acggcctctttggccctcgagaca

What is claimed is:

1. An isolated polynucleotide comprising a nucleotide sequence selected from the group consisting of:
SEQ ID NO:1, SEQ ID NO:2, SEQ ID NO:3, SEQ ID NO:4, SEQ ID NO:5, SEQ ID NO:6, SEQ ID NO:7, SEQ ID NO:8, SEQ ID NO:9, SEQ ID NO:10, SEQ ID NO:11, SEQ ID NO:12, SEQ ID NO:13, SEQ ID NO:14, SEQ ID NO:15, SEQ ID NO:16, SEQ ID NO:17, SEQ ID NO:18, SEQ ID NO:19, SEQ ID NO:20, SEQ ID NO:21, SEQ ID NO:22, SEQ ID NO:23, SEQ ID NO:24, SEQ ID NO:25, SEQ ID NO:26, SEQ ID NO:27, SEQ ID NO:28, SEQ ID NO:29, SEQ ID NO:30, SEQ ID NO:31, SEQ ID NO:32, SEQ ID NO:33, SEQ ID NO:34, SEQ ID NO:35, SEQ ID NO:36, SEQ ID NO:37, SEQ ID NO:38, SEQ ID NO:39, SEQ ID NO:40, SEQ ID NO:41, SEQ ID NO:42, SEQ ID NO:43, SEQ ID NO:44, SEQ ID NO:45, SEQ ID NO:46, SEQ ID NO:47, SEQ ID NO:48, SEQ ID NO:49, SEQ ID NO:50, SEQ ID NO:51, SEQ ID NO:52, SEQ ID NO:53, SEQ ID NO:54, SEQ ID NO:55, SEQ ID NO:56, SEQ ID NO:57, SEQ ID NO:58, SEQ ID NO:59, SEQ ID NO:60, SEQ ID NO:61, SEQ ID NO:62, SEQ ID NO:63, SEQ ID NO:64, SEQ ID NO:65, SEQ ID NO:66, SEQ ID NO:67, SEQ ID NO:68, SEQ ID NO:69, SEQ ID NO:70, SEQ ID NO:71, SEQ ID NO:72, SEQ ID NO:73, SEQ ID NO:74, SEQ ID NO:75, SEQ ID NO:76, SEQ ID NO:77, SEQ ID NO:78, SEQ ID NO:79, SEQ ID NO:80, SEQ ID NO:81, SEQ ID NO:82, SEQ ID NO:83, SEQ ID NO:84, SEQ ID NO:85, SEQ ID NO:86, SEQ ID NO:87, SEQ ID NO:88, SEQ ID NO:89, SEQ ID NO:90, SEQ ID NO:91, SEQ ID NO:92, SEQ ID NO:93, SEQ ID NO:94, SEQ ID NO:95, SEQ ID NO:96, SEQ ID NO:97, SEQ ID NO:98, SEQ ID NO:99, SEQ ID NO:100, SEQ ID NO:101, SEQ ID NO:102, SEQ ID NO:103, SEQ ID NO:104, SEQ ID NO:105, SEQ ID NO:106, SEQ ID NO:107, SEQ ID NO:108, SEQ ID NO:109, SEQ ID NO:110, SEQ ID NO:111, SEQ ID NO:112, SEQ ID NO:113, SEQ ID NO:114, SEQ ID NO:115, SEQ ID NO:116, SEQ ID NO:117, SEQ ID NO:118, SEQ ID NO:119, SEQ ID NO:120, SEQ ID NO:121, SEQ ID NO:122, SEQ ID NO:123, SEQ ID NO:124, SEQ ID NO:125, SEQ ID NO:126, SEQ ID NO:127, SEQ ID NO:128, SEQ ID NO:129, SEQ ID NO:130, SEQ ID NO:131, SEQ ID NO:132, SEQ ID NO:133, SEQ ID NO:134, SEQ ID NO:135, SEQ ID NO:136, SEQ ID NO:137, SEQ ID NO:138, SEQ ID NO:139, SEQ ID NO:140, SEQ ID NO:141, SEQ ID NO:142, SEQ ID NO:143, SEQ ID NO:144, SEQ ID NO:145, SEQ ID NO:146, SEQ ID NO:147, SEQ ID NO:148, SEQ ID NO:149, SEQ ID NO:150, SEQ ID NO:151, SEQ ID NO:152, SEQ ID NO:153, SEQ ID NO:154, SEQ ID NO:155, SEQ ID NO:156, SEQ ID NO:157, SEQ ID NO:158, SEQ ID NO:159, SEQ ID NO:160, SEQ ID NO:161, SEQ ID NO:162, SEQ ID NO:163, SEQ ID NO:164, SEQ ID NO:165, SEQ ID NO:166, SEQ ID NO:167, SEQ ID NO:168, SEQ ID NO:169, SEQ ID NO:170, SEQ ID NO:171, SEQ ID NO:172, SEQ ID NO:173, SEQ ID NO:174, SEQ ID NO:175, SEQ ID NO:176, SEQ ID NO:177, SEQ ID NO:178, SEQ ID NO:179, SEQ ID NO:180, SEQ ID NO:181, SEQ ID NO:182, SEQ ID NO:183, SEQ ID NO:184, SEQ ID NO:185, SEQ ID NO:186, SEQ ID NO:187, SEQ ID NO:188, SEQ ID NO:189, SEQ ID NO:190, SEQ ID NO:191, SEQ ID NO:192, SEQ ID NO:193, SEQ ID NO:194, SEQ ID NO:195, SEQ ID NO:196, SEQ ID NO:197, SEQ ID NO:198, SEQ ID NO:199, SEQ ID NO:200, SEQ ID NO:201, SEQ ID NO:202, SEQ ID NO:203, SEQ ID NO:204, SEQ ID NO:205, SEQ ID NO:206, SEQ ID NO:207, SEQ ID NO:208, SEQ ID NO:209, SEQ ID NO:210, SEQ ID NO:211, SEQ ID NO:212, SEQ ID NO:213, SEQ ID NO:214, SEQ ID NO:215, SEQ ID NO:216, SEQ ID NO:217, SEQ ID NO:218, SEQ ID NO:219, SEQ ID NO:220, SEQ ID NO:221, SEQ ID NO:222, SEQ ID NO:223, SEQ ID NO:224, SEQ ID NO:225, SEQ ID NO:226, SEQ ID NO:227, SEQ ID NO:228, SEQ ID NO:229, SEQ ID NO:230, SEQ ID NO:231, SEQ ID NO:232, SEQ ID NO:233, SEQ ID NO:234, SEQ ID NO:235, SEQ ID NO:236, SEQ ID NO:237, SEQ ID NO:238, SEQ ID NO:239, SEQ ID NO:243, SEQ ID NO:241, SEQ ID NO:242, SEQ ID NO:243, SEQ ID NO:244, SEQ ID NO:245, SEQ ID NO:246, SEQ ID NO:247, SEQ ID NO:248, SEQ ID NO:249, SEQ ID NO:250, SEQ ID NO:251, SEQ ID NO:252, SEQ ID NO:253, SEQ ID NO:254, SEQ ID NO:255, SEQ ID NO:256, SEQ ID NO:257, SEQ ID NO:258, SEQ ID NO:259, SEQ ID NO:260, SEQ ID NO:261, SEQ ID NO:264, SEQ ID NO:263, SEQ ID NO:264, SEQ ID NO:265, SEQ ID NO:266, SEQ ID NO:267, SEQ ID NO:268, SEQ ID NO:269, SEQ ID NO:270, SEQ ID NO:271, SEQ ID NO:272, SEQ ID NO:273, SEQ ID NO:274, SEQ ID NO:275, SEQ ID NO:276, SEQ ID NO:277, SEQ ID NO:278, SEQ ID NO:279, SEQ ID NO:280, SEQ ID NO:281, SEQ ID NO:282, SEQ ID NO:283, SEQ ID NO:284, SEQ ID NO:285, SEQ ID NO:286, SEQ ID NO:287, SEQ ID NO:288, SEQ ID NO:289, SEQ ID NO:290, SEQ ID NO:291, SEQ ID NO:292, SEQ ID NO:293, SEQ ID NO:294, SEQ ID NO:295, SEQ ID NO:296, SEQ ID NO:297, SEQ ID NO:298, SEQ ID NO:299, SEQ ID NO:300, SEQ ID NO:301, SEQ ID NO:302, SEQ ID NO:303, SEQ ID NO:324, SEQ ID NO:305, SEQ ID NO:306, SEQ ID NO:307, SEQ ID NO:308, SEQ ID NO:309, SEQ ID NO:310, SEQ ID NO:311, SEQ ID NO:312, SEQ ID NO:313, SEQ ID NO:314, SEQ ID NO:315, SEQ ID NO:316, SEQ ID NO:317, SEQ ID NO:318, SEQ ID NO:319, SEQ ID NO:320, SEQ ID NO:321, SEQ ID NO:322, SEQ ID NO:323, SEQ ID NO:324, SEQ ID NO:325, SEQ ID NO:326, SEQ ID NO:327, SEQ ID NO:328, SEQ ID NO:329, SEQ ID NO:330, SEQ ID NO:331, SEQ ID NO:332, SEQ ID NO:333, SEQ ID NO:334, SEQ ID NO:335, SEQ ID NO:336, SEQ ID NO:337, SEQ ID NO:338, SEQ ID NO:339, SEQ ID NO:340, SEQ ID NO:341, SEQ ID NO:342, SEQ ID NO:343, SEQ ID NO:344, SEQ ID NO:345, SEQ ID NO:346, SEQ ID NO:347, SEQ ID NO:348, SEQ ID NO:349, SEQ ID NO:350, SEQ ID NO:351, SEQ ID NO:352, SEQ ID NO:353, SEQ ID NO:354, SEQ ID NO:355, SEQ ID NO:356, SEQ ID NO:357, SEQ ID NO:358, SEQ ID NO:359, SEQ ID NO:360, SEQ ID NO:361, SEQ ID NO:362, SEQ ID NO:363, SEQ ID NO:364, SEQ ID NO:365, SEQ ID NO:366, SEQ ID NO:367, SEQ ID NO:368, SEQ ID NO:369, SEQ ID NO:370, SEQ ID NO:371, SEQ ID NO:372, SEQ ID NO:373, SEQ ID NO:374, SEQ ID NO:375, SEQ ID NO:376, SEQ ID NO:377, SEQ ID NO:378, SEQ ID NO:379, SEQ ID NO:380, SEQ ID NO:381, SEQ ID NO:382, SEQ ID NO:383, SEQ ID NO:384, SEQ ID NO:385, SEQ ID NO:386, SEQ ID NO:387, SEQ ID NO:388, SEQ ID NO:389, SEQ ID NO:390, SEQ ID NO:391, SEQ ID NO:392, SEQ ID NO:393, SEQ ID NO:394, SEQ ID NO:395, SEQ ID NO:396, SEQ ID NO:397, SEQ ID NO:398, SEQ ID NO:399, SEQ ID NO:400, SEQ ID NO:401, SEQ ID NO:402, SEQ ID NO:403, SEQ ID NO:404, SEQ ID NO:405, SEQ ID NO:406, SEQ ID NO:407, SEQ ID NO:408, SEQ ID NO:409, SEQ ID NO:410, SEQ ID NO:411, SEQ ID NO:412, SEQ ID NO:413, SEQ ID NO:414, SEQ ID NO:415, SEQ ID NO:416, SEQ ID NO:417, SEQ ID NO:418, SEQ ID NO:419, SEQ ID NO:420, SEQ ID NO:421, SEQ ID NO:422, SEQ ID NO:423, SEQ ID NO:424, SEQ ID NO:425, SEQ ID NO:426, SEQ ID NO:427, SEQ ID NO:428, SEQ ID NO:429, SEQ ID NO:430, SEQ ID NO:431, SEQ ID NO:432, SEQ ID NO:433, SEQ ID NO:434, SEQ ID NO:435, SEQ ID NO:436, SEQ ID NO:437, SEQ ID NO:438, SEQ ID NO:439, SEQ ID NO:440, SEQ ID NO:441, SEQ ID NO:442, SEQ ID NO:443, SEQ ID NO:444, SEQ ID NO:445, SEQ ID NO:446, SEQ ID NO:447, SEQ ID NO:448, SEQ ID NO:449, SEQ ID NO:450, SEQ ID NO:451, SEQ ID NO:452, SEQ ID NO:453, SEQ ID NO:454, SEQ ID NO:455, SEQ ID NO:456, SEQ ID NO:457, SEQ ID NO:458, SEQ ID NO:459, SEQ ID NO:460, SEQ ID NO:461, SEQ ID NO:462, SEQ ID NO:463, SEQ ID NO:464, SEQ ID NO:465, SEQ ID NO:466, SEQ ID NO:467, SEQ ID NO:468, SEQ ID NO:469, SEQ ID NO:470, SEQ ID NO:471, SEQ ID NO:472, SEQ ID NO:473, SEQ ID NO:474, SEQ ID NO:475, SEQ ID NO:476, SEQ ID NO:477, SEQ ID NO:478, SEQ ID NO:479, SEQ ID NO:480, SEQ ID NO:481, SEQ ID NO:482, SEQ ID NO:483, SEQ ID NO:484, SEQ ID NO:485, SEQ ID NO:486, SEQ ID NO:487, SEQ ID NO:488, SEQ ID NO:489, SEQ ID NO:490, SEQ ID NO:491, SEQ ID NO:492, SEQ ID NO:493, SEQ ID NO:494, SEQ ID NO:495, SEQ ID NO:496, SEQ ID NO:497, SEQ ID NO:498, SEQ ID NO:499, SEQ ID NO:500, SEQ ID NO:501, SEQ ID NO:502, SEQ ID NO:503, SEQ ID NO:504, SEQ ID NO:505, SEQ ID NO:506, SEQ ID NO:507, SEQ ID NO:508, SEQ ID NO:509, SEQ ID NO:510, SEQ ID NO:511, SEQ ID NO:512, SEQ ID NO:513, SEQ ID NO:514, SEQ ID NO:515, SEQ ID NO:516, SEQ ID NO:517, SEQ ID NO:518, SEQ ID NO:519, SEQ ID NO:520, SEQ ID NO:521, SEQ ID NO:522, SEQ ID NO:523, SEQ ID NO:524, SEQ ID NO:525, SEQ ID NO:526, SEQ ID NO:527, SEQ ID NO:528, SEQ ID NO:529, SEQ ID NO:530, SEQ ID NO:531, SEQ ID NO:532, SEQ ID NO:533, SEQ ID NO:534, SEQ ID NO:535, SEQ ID NO:536, SEQ ID NO:537, SEQ ID NO:538, SEQ ID NO:539, SEQ ID NO:540, SEQ ID NO:541, SEQ ID NO:542, SEQ ID NO:543, SEQ ID NO:544, SEQ ID NO:545, SEQ ID NO:546, SEQ ID NO:547, SEQ ID NO:548, SEQ ID NO:549, SEQ ID NO:550, SEQ ID NO:551, SEQ ID NO:552, SEQ ID NO:553, SEQ ID NO:554, SEQ ID NO:555, SEQ ID NO:556, SEQ ID NO:557, SEQ ID NO:558, SEQ ID NO:559, SEQ ID NO:560, SEQ ID NO:561, SEQ ID NO:562, SEQ ID NO:563, SEQ ID NO:564, SEQ ID NO:565, SEQ ID NO:566, SEQ ID NO:567, SEQ ID NO:568, SEQ ID NO:569, SEQ ID NO:570, SEQ ID NO:571, SEQ ID NO:572, SEQ ID NO:573, SEQ ID NO:574, SEQ ID NO:575, SEQ ID NO:576, SEQ ID NO:577, SEQ ID NO:578, SEQ ID NO:579, SEQ ID NO:580, SEQ ID NO:581, SEQ ID NO:582, SEQ ID NO:583, SEQ ID NO:584, SEQ ID NO:585, SEQ ID NO:586, SEQ ID NO:587, SEQ ID NO:588, SEQ ID NO:589, SEQ ID NO:590, SEQ ID NO:591, SEQ ID NO:592, SEQ ID NO:593, SEQ ID NO:594, SEQ ID NO:595, SEQ ID NO:596, SEQ ID NO:597, SEQ ID NO:598, SEQ ID NO:599, SEQ ID NO:600, SEQ ID NO:601, SEQ ID NO:602, SEQ ID NO:603, SEQ ID NO:604, SEQ ID NO:605, SEQ ID NO:606, SEQ ID NO:607, SEQ ID NO:608, SEQ ID NO:609, SEQ ID NO:610, SEQ ID NO:611, SEQ ID NO:612, SEQ ID NO:613, SEQ ID NO:614, SEQ ID NO:615, SEQ ID NO:616, SEQ ID NO:617, SEQ ID NO:618, SEQ ID NO:619, SEQ ID NO:620, SEQ ID NO:621, SEQ ID NO:622, SEQ ID NO:623, SEQ ID NO:624, SEQ ID NO:625;
or a complement of said sequence.

2. An isolated polynucleotide consisting of a nucleotide sequence selected from the group consisting of:
SEQ ID NO:1, SEQ ID NO:2, SEQ ID NO:3, SEQ ID NO:4, SEQ ID NO:5, SEQ ID NO:6, SEQ ID NO:7, SEQ ID NO:8, SEQ ID NO:9, SEQ ID NO:10, SEQ ID NO:11, SEQ ID NO:12, SEQ ID NO:13, SEQ ID NO:14, SEQ ID NO:15, SEQ ID NO:16, SEQ ID NO:17, SEQ ID NO:18, SEQ ID NO:19, SEQ ID NO:20, SEQ ID NO:21, SEQ ID NO:22, SEQ ID NO:23, SEQ ID NO:24, SEQ ID NO:25, SEQ ID NO:26, SEQ ID NO:27, SEQ ID NO:28, SEQ ID NO:29, SEQ ID NO:30, SEQ ID NO:31, SEQ ID NO:32, SEQ ID NO:33, SEQ ID NO:34, SEQ ID NO:35, SEQ ID NO:36, SEQ ID NO:37, SEQ ID NO:38, SEQ ID NO:39, SEQ ID NO:40, SEQ ID NO:41, SEQ ID NO:42, SEQ ID NO:43, SEQ ID NO:44, SEQ ID NO:45, SEQ ID NO:46, SEQ ID NO:47, SEQ ID NO:48, SEQ ID NO:49, SEQ ID NO:50, SEQ ID NO:51, SEQ ID NO:52, SEQ ID NO:53, SEQ ID NO:54, SEQ ID NO:55, SEQ ID NO:56, SEQ ID NO:57, SEQ ID NO:58, SEQ ID NO:59, SEQ ID NO:60, SEQ ID NO:61, SEQ ID NO:62, SEQ ID NO:63, SEQ ID NO:64, SEQ ID NO:65, SEQ ID NO:66, SEQ ID NO:67, SEQ ID NO:68, SEQ ID NO:69, SEQ ID NO:70, SEQ ID NO:71, SEQ ID NO:72, SEQ ID NO:73, SEQ ID NO:74, SEQ ID NO:75, SEQ ID NO:76, SEQ ID NO:77, SEQ ID NO:78, SEQ ID NO:79, SEQ ID NO:80, SEQ ID NO:81, SEQ ID NO:82, SEQ ID NO:83, SEQ ID NO:84, SEQ ID NO:85, SEQ ID NO:86, SEQ ID NO:87, SEQ ID NO:88, SEQ ID NO:89, SEQ ID NO:90, SEQ ID NO:91, SEQ ID NO:92, SEQ ID NO:93, SEQ ID NO:94, SEQ ID NO:95, SEQ ID NO:96, SEQ ID NO:97, SEQ ID NO:98, SEQ ID NO:99, SEQ ID NO:100, SEQ ID NO:101, SEQ ID NO:102, SEQ ID NO:103, SEQ ID NO:104, SEQ ID NO:105, SEQ ID NO:106, SEQ ID NO:107, SEQ ID NO:108, SEQ ID NO:109, SEQ ID NO:110, SEQ ID NO:111, SEQ ID NO:112, SEQ ID NO:113, SEQ ID NO:114, SEQ ID NO:115, SEQ ID NO:116, SEQ ID NO:117, SEQ ID NO:118, SEQ ID NO:119, SEQ ID NO:120, SEQ ID NO:121, SEQ ID NO:122, SEQ ID NO:123, SEQ ID NO:124, SEQ ID NO:125, SEQ ID NO:126, SEQ ID NO:127, SEQ ID NO:128, SEQ ID NO:129, SEQ ID NO:130, SEQ ID NO:131, SEQ ID NO:132, SEQ ID NO:133, SEQ ID NO:134, SEQ ID NO:135, SEQ ID NO:136, SEQ ID NO:137, SEQ ID NO:138, SEQ ID NO:139, SEQ ID NO:140, SEQ ID NO:141, SEQ ID NO:142, SEQ ID NO:143, SEQ ID NO:144, SEQ ID NO:145, SEQ ID NO:146, SEQ ID NO:147, SEQ ID NO:148, SEQ ID NO:149, SEQ ID NO:150, SEQ ID NO:151, SEQ ID NO:152, SEQ ID NO:153, SEQ ID NO:154, SEQ ID NO:155, SEQ ID NO:156, SEQ ID NO:157, SEQ ID NO:158, SEQ ID NO:159, SEQ ID NO:160, SEQ ID NO:161, SEQ ID NO:162, SEQ ID NO:163, SEQ ID NO:164, SEQ ID NO:165, SEQ ID NO:166, SEQ ID NO:167, SEQ ID NO:168, SEQ ID NO:169, SEQ ID NO:170, SEQ ID NO:171, SEQ ID NO:172, SEQ ID NO:173, SEQ ID NO:174, SEQ ID NO:175, SEQ ID NO:176, SEQ ID NO:177, SEQ ID NO:178, SEQ ID NO:179, SEQ ID NO:180, SEQ ID NO:181, SEQ ID NO:182, SEQ ID NO:183, SEQ ID NO:184, SEQ ID NO:185, SEQ ID NO:186, SEQ ID NO:187, SEQ ID NO:188, SEQ ID NO:189, SEQ ID NO:190, SEQ ID NO:191, SEQ ID NO:192, SEQ ID NO:193, SEQ ID NO:194, SEQ ID NO:195, SEQ ID NO:196, SEQ ID NO:197, SEQ ID NO:198, SEQ ID NO:199, SEQ ID NO:200, SEQ ID NO:201, SEQ ID NO:202, SEQ ID NO:203, SEQ ID NO:204, SEQ ID NO:205, SEQ ID NO:206, SEQ ID NO:207, SEQ ID NO:208, SEQ ID NO:209, SEQ ID NO:210, SEQ ID NO:211, SEQ ID NO:212, SEQ ID NO:213, SEQ ID NO:214, SEQ ID NO:215, SEQ ID NO:216, SEQ ID NO:217, SEQ ID NO:218, SEQ ID NO:219, SEQ ID NO:220, SEQ ID NO:221, SEQ ID NO:222, SEQ ID NO:223, SEQ ID NO:224, SEQ ID NO:225, SEQ ID NO:226, SEQ ID NO:227, SEQ ID NO:228, SEQ ID NO:229, SEQ ID NO:230, SEQ ID NO:231, SEQ ID NO:232, SEQ ID NO:233, SEQ ID NO:234, SEQ ID NO:235, SEQ ID NO:236, SEQ ID NO:237, SEQ ID NO:238, SEQ ID NO:239, SEQ ID NO:240, SEQ ID NO:241, SEQ ID NO:242, SEQ ID NO:243, SEQ ID NO:244, SEQ ID NO:245, SEQ ID NO:246, SEQ ID NO:247, SEQ ID NO:248, SEQ ID NO:249, SEQ ID NO:250, SEQ ID NO:251, SEQ ID NO:252, SEQ ID NO:253, SEQ ID NO:254, SEQ ID NO:255, SEQ ID NO:256, SEQ ID NO:257, SEQ ID NO:258, SEQ ID NO:259, SEQ ID NO:260, SEQ ID NO:261, SEQ ID NO:262, SEQ ID NO:263, SEQ ID NO:264, SEQ ID NO:265, SEQ ID NO:266, SEQ ID NO:267, SEQ ID NO:268, SEQ ID NO:269, SEQ ID NO:270, SEQ ID NO:271, SEQ ID NO:272, SEQ ID NO:273, SEQ ID NO:274, SEQ ID NO:275, SEQ ID NO:276, SEQ ID NO:277, SEQ ID NO:278, SEQ ID NO:279, SEQ ID NO:280, SEQ ID NO:281, SEQ ID NO:282, SEQ ID NO:283, SEQ ID NO:284, SEQ ID NO:285, SEQ ID NO:286, SEQ ID NO:287, SEQ ID NO:288, SEQ ID NO:289, SEQ ID NO:290, SEQ ID NO:291, SEQ ID NO:292, SEQ ID NO:293, SEQ ID NO:294, SEQ ID NO:295, SEQ ID NO:296, SEQ ID NO:297, SEQ ID NO:298, SEQ ID NO:299, SEQ ID NO:300, SEQ ID NO:301, SEQ ID NO:302, SEQ ID NO:303, SEQ ID NO:304, SEQ ID NO:305, SEQ ID NO:306, SEQ ID NO:307, SEQ ID NO:308, SEQ ID NO:309, SEQ ID NO:310, SEQ ID NO:311, SEQ ID NO:312, SEQ ID NO:313, SEQ ID NO:314, SEQ ID NO:315, SEQ ID NO:316, SEQ ID NO:317, SEQ ID NO:318, SEQ ID NO:319, SEQ ID NO:320, SEQ ID NO:321, SEQ ID NO:322, SEQ ID NO:323, SEQ ID NO:324, SEQ ID NO:325, SEQ ID NO:326, SEQ ID NO:327, SEQ ID NO:328, SEQ ID NO:329, SEQ ID NO:330, SEQ ID NO:331, SEQ ID NO:332, SEQ ID NO:333, SEQ ID NO:334, SEQ ID NO:335, SEQ ID NO:336, SEQ ID NO:337, SEQ ID NO:338, SEQ ID NO:339, SEQ ID NO:340, SEQ ID NO:341, SEQ ID NO:342, SEQ ID NO:343, SEQ ID NO:344, SEQ ID NO:345, SEQ ID NO:346, SEQ ID NO:347, SEQ ID NO:348, SEQ ID NO:349, SEQ ID NO:350, SEQ ID NO:351, SEQ ID NO:352, SEQ ID NO:353, SEQ ID NO:354, SEQ ID NO:355, SEQ ID NO:356, SEQ ID NO:357, SEQ ID NO:358, SEQ ID NO:359, SEQ ID NO:360, SEQ ID NO:361, SEQ ID NO:362, SEQ ID NO:363, SEQ ID NO:364, SEQ ID NO:365, SEQ ID NO:366, SEQ ID NO:367, SEQ ID NO:368, SEQ ID NO:369, SEQ ID NO:370, SEQ ID NO:371, SEQ ID NO:372, SEQ ID NO:373, SEQ ID NO:374, SEQ ID NO:375, SEQ ID NO:376, SEQ ID NO:377, SEQ ID NO:378, SEQ ID NO:379, SEQ ID NO:380, SEQ ID NO:381, SEQ ID NO:382, SEQ ID NO:383, SEQ ID NO:384, SEQ ID NO:385, SEQ ID NO:386, SEQ ID NO:387, SEQ ID NO:388, SEQ ID NO:389, SEQ ID NO:390, SEQ ID NO:391, SEQ ID NO:392, SEQ ID NO:393, SEQ ID NO:394, SEQ ID NO:395, SEQ ID NO:396, SEQ ID NO:397, SEQ ID NO:398, SEQ ID NO:399, SEQ ID NO:400, SEQ ID NO:401, SEQ ID NO:402, SEQ ID NO:403, SEQ ID NO:404, SEQ ID NO:405, SEQ ID NO:406, SEQ ID NO:407, SEQ ID NO:408, SEQ ID NO:409, SEQ ID NO:410, SEQ ID NO:411, SEQ ID NO:412, SEQ ID NO:413, SEQ ID NO:414, SEQ ID NO:415, SEQ ID NO:416, SEQ ID NO:417, SEQ ID NO:418, SEQ ID NO:419, SEQ ID NO:420, SEQ ID NO:421, SEQ ID NO:422, SEQ ID NO:423, SEQ ID NO:424, SEQ ID NO:425, SEQ ID NO:426, SEQ ID NO:427, SEQ ID NO:428, SEQ ID NO:429, SEQ ID NO:430, SEQ ID NO:431, SEQ ID NO:432, SEQ ID NO:433, SEQ ID NO:434, SEQ ID NO:435, SEQ ID NO:436, SEQ ID NO:437, SEQ ID NO:438, SEQ ID NO:439, SEQ ID NO:440, SEQ ID NO:441, SEQ ID NO:442, SEQ ID NO:443, SEQ ID NO:444, SEQ ID NO:445, SEQ ID NO:446, SEQ ID NO:447, SEQ ID NO:448, SEQ ID NO:449, SEQ ID NO:450, SEQ ID NO:451, SEQ ID NO:452, SEQ ID NO:453, SEQ ID NO:454, SEQ ID NO:455, SEQ ID NO:456, SEQ ID NO:457, SEQ ID NO:458, SEQ ID NO:459, SEQ ID NO:460, SEQ ID NO:461, SEQ ID NO:462, SEQ ID NO:463, SEQ ID NO:464, SEQ ID NO:465, SEQ ID NO:466, SEQ ID NO:467, SEQ ID NO:468, SEQ ID NO:469, SEQ ID NO:470, SEQ ID NO:471, SEQ ID NO:472, SEQ ID NO:473, SEQ ID NO:474, SEQ ID NO:475, SEQ ID NO:476, SEQ ID NO:477, SEQ ID NO:478, SEQ ID NO:479, SEQ ID NO:480, SEQ ID NO:481, SEQ ID NO:482, SEQ ID NO:483, SEQ ID NO:484, SEQ ID NO:485, SEQ ID NO:486, SEQ ID NO:487, SEQ ID NO:488, SEQ ID NO:489, SEQ ID NO:490, SEQ ID NO:491, SEQ ID NO:492, SEQ ID NO:493, SEQ ID NO:494, SEQ ID NO:495, SEQ ID NO:496, SEQ ID NO:497, SEQ ID NO:498, SEQ ID NO:499, SEQ ID NO:500, SEQ ID NO:501, SEQ ID NO:502, SEQ ID NO:503, SEQ ID NO:504, SEQ ID NO:505, SEQ ID NO:506, SEQ ID NO:507, SEQ ID NO:508, SEQ ID NO:509, SEQ ID NO:510, SEQ ID NO:511, SEQ ID NO:512, SEQ ID NO:513, SEQ ID NO:514, SEQ ID NO:515, SEQ ID NO:516, SEQ ID NO:517, SEQ ID NO:518, SEQ ID NO:519, SEQ ID NO:520, SEQ ID NO:521, SEQ ID NO:522, SEQ ID NO:523, SEQ ID NO:524, SEQ ID NO:525, SEQ ID NO:526, SEQ ID NO:527, SEQ ID NO:528, SEQ ID NO:529, SEQ ID NO:530, SEQ ID NO:531, SEQ ID NO:532, SEQ ID NO:533, SEQ ID NO:534, SEQ ID NO:535, SEQ ID NO:536, SEQ ID NO:537, SEQ ID NO:538, SEQ ID NO:539, SEQ ID NO:540, SEQ ID NO:541, SEQ ID NO:542, SEQ ID NO:543, SEQ ID NO:544, SEQ ID NO:545, SEQ ID NO:546, SEQ ID NO:547, SEQ ID NO:548, SEQ ID NO:549, SEQ ID NO:550, SEQ ID NO:551, SEQ ID NO:552, SEQ ID NO:553, SEQ ID NO:554, SEQ ID NO:555, SEQ ID NO:556, SEQ ID NO:557, SEQ ID NO:558, SEQ ID NO:559, SEQ ID NO:560, SEQ ID NO:561, SEQ ID NO:562, SEQ ID NO:563, SEQ ID NO:564, SEQ ID NO:565, SEQ ID NO:566, SEQ ID NO:567, SEQ ID NO:568, SEQ ID NO:569, SEQ ID NO:570, SEQ ID NO:571, SEQ ID NO:572, SEQ ID NO:573, SEQ ID NO:574, SEQ ID NO:575, SEQ ID NO:576, SEQ ID NO:577, SEQ ID NO:578, SEQ ID NO:579, SEQ ID NO:580, SEQ ID NO:581, SEQ ID NO:582, SEQ ID NO:583, SEQ ID NO:584, SEQ ID NO:585, SEQ ID NO:586, SEQ ID NO:587, SEQ ID NO:588, SEQ ID NO:589, SEQ ID NO:590, SEQ ID NO:591, SEQ ID NO:592, SEQ ID NO:593, SEQ ID NO:594, SEQ ID NO:595, SEQ ID NO:596, SEQ ID NO:597, SEQ ID NO:598, SEQ ID NO:599, SEQ ID NO:600, SEQ ID NO:601, SEQ ID NO:602, SEQ ID NO:603, SEQ ID NO:604, SEQ ID NO:605, SEQ ID NO:606, SEQ ID NO:607, SEQ ID NO:608, SEQ ID NO:609, SEQ ID NO:610, SEQ ID NO:611, SEQ ID NO:612, SEQ ID NO:613, SEQ ID NO:614, SEQ ID NO:615, SEQ ID NO:616, SEQ ID NO:617, SEQ ID NO:618, SEQ ID NO:619, SEQ ID NO:620, SEQ ID NO:621, SEQ ID NO:622, SEQ ID NO:623, SEQ ID NO:624, SEQ ID NO:625;
or a complement of said sequence.

3. An isolated polynucleotide comprising a nucleotide sequence which hybridizes to a sequence selected from the group consisting of:
SEQ ID NO:1, SEQ ID NO:2, SEQ ID NO:3, SEQ ID NO:4, SEQ ID NO:5, SEQ ID NO:6, SEQ ID NO:7, SEQ ID NO:8, SEQ ID NO:9, SEQ ID NO:10, SEQ ID NO:11, SEQ ID NO:12, SEQ ID NO:13, SEQ ID NO:14, SEQ ID NO:15, SEQ ID NO:16, SEQ ID NO:17, SEQ ID NO:18, SEQ ID NO:19, SEQ ID NO:20, SEQ ID NO:21, SEQ ID NO:22, SEQ ID NO:23, SEQ ID NO:24, SEQ ID NO:25, SEQ ID NO:26, SEQ ID NO:27, SEQ ID NO:28, SEQ ID NO:29, SEQ ID NO:30, SEQ ID NO:31, SEQ ID NO:32, SEQ ID NO:33, SEQ ID NO:34, SEQ ID NO:35, SEQ ID NO:36, SEQ ID NO:37, SEQ ID NO:38, SEQ ID NO:29, SEQ ID NO:40, SEQ ID NO:41, SEQ ID NO:42, SEQ ID NO:43, SEQ ID NO:44, SEQ ID NO:45, SEQ ID NO:46, SEQ ID NO:47, SEQ ID NO:48, SEQ ID NO:49, SEQ ID NO:50, SEQ ID NO:51, SEQ ID NO:52, SEQ ID NO:53, SEQ ID NO:54, SEQ ID NO:55, SEQ ID NO:56, SEQ ID NO:57, SEQ ID NO:58, SEQ ID NO:59, SEQ ID NO:60, SEQ ID NO:61, SEQ ID NO:62, SEQ ID NO:63, SEQ ID NO:64, SEQ ID NO:65, SEQ ID NO:66, SEQ ID NO:67, SEQ ID NO:68, SEQ ID NO:69, SEQ ID NO:70, SEQ ID NO:71, SEQ ID NO:72, SEQ ID NO:73, SEQ ID NO:74, SEQ ID NO:75, SEQ ID NO:76, SEQ ID NO:77, SEQ ID NO:78, SEQ ID NO:79, SEQ ID NO:80, SEQ ID NO:81, SEQ ID NO:82, SEQ ID NO:83, SEQ ID NO:84, SEQ ID NO:85, SEQ ID NO:86, SEQ ID NO:87, SEQ ID NO:88, SEQ ID NO:89, SEQ ID NO:90, SEQ ID NO:91, SEQ ID NO:92, SEQ ID NO:93, SEQ ID NO:94, SEQ ID NO:95, SEQ ID NO:96, SEQ ID NO:97, SEQ ID NO:98, SEQ ID NO:99, SEQ ID NO:100, SEQ ID NO:101, SEQ ID NO:102, SEQ ID NO:103, SEQ ID NO:104, SEQ ID NO:105, SEQ ID NO:106, SEQ ID NO:107, SEQ ID NO:108, SEQ ID NO:109, SEQ ID NO:110, SEQ ID NO:111, SEQ ID NO:112, SEQ ID NO:113, SEQ ID NO:114, SEQ ID NO:115, SEQ ID NO:116, SEQ ID NO:117, SEQ ID NO:118, SEQ ID NO:119, SEQ ID NO:120, SEQ ID NO:121, SEQ ID NO:122, SEQ ID NO:123, SEQ ID NO:124, SEQ ID NO:125, SEQ ID NO:126, SEQ ID NO:127, SEQ ID NO:128, SEQ ID NO:129, SEQ ID NO:130, SEQ ID NO:131, SEQ ID NO:132, SEQ ID NO:133, SEQ ID NO:134, SEQ ID NO:135, SEQ ID NO:136, SEQ ID NO:137, SEQ ID NO:138, SEQ ID NO:139, SEQ ID NO:140, SEQ ID NO:141, SEQ ID NO:142, SEQ ID NO:143, SEQ ID NO:144, SEQ ID NO:145, SEQ ID NO:146, SEQ ID NO:147, SEQ ID NO:148, SEQ ID NO:149, SEQ ID NO:150, SEQ ID NO:151, SEQ ID NO:152, SEQ ID NO:153, SEQ ID NO:154, SEQ ID NO:155, SEQ ID NO:156, SEQ ID NO:157, SEQ ID NO:158, SEQ ID NO:159, SEQ ID NO:160, SEQ ID NO:161, SEQ ID NO:162, SEQ ID NO:163, SEQ ID NO:164, SEQ ID NO:165, SEQ ID NO:166, SEQ ID NO:167, SEQ ID NO:168, SEQ ID NO:169, SEQ ID NO:170, SEQ ID NO:171, SEQ ID NO:172, SEQ ID NO:173, SEQ ID NO:174, SEQ ID NO:175, SEQ ID NO:176, SEQ ID NO:177, SEQ ID NO:178, SEQ ID NO:179, SEQ ID NO:180, SEQ ID NO:181, SEQ ID NO:182, SEQ ID NO:183, SEQ ID NO:184, SEQ ID NO:185, SEQ ID NO:186, SEQ ID NO:187, SEQ ID NO:188, SEQ ID NO:189, SEQ ID NO:190, SEQ ID NO:191, SEQ ID NO:192, SEQ ID NO:193, SEQ ID NO:194, SEQ ID NO:195, SEQ ID NO:196, SEQ ID NO:197, SEQ ID NO:198, SEQ ID NO:199, SEQ ID NO:200, SEQ ID NO:201, SEQ ID NO:202, SEQ ID NO:203, SEQ ID NO:204, SEQ ID NO:205, SEQ ID NO:206, SEQ ID NO:207, SEQ ID NO:208, SEQ ID NO:209, SEQ ID NO:210, SEQ ID NO:211, SEQ ID NO:212, SEQ ID NO:213, SEQ ID NO:214, SEQ ID NO:215, SEQ ID NO:216, SEQ ID NO:217, SEQ ID NO:218, SEQ ID NO:219, SEQ ID NO:220, SEQ ID NO:221, SEQ ID NO:222, SEQ ID NO:223, SEQ ID NO:224, SEQ ID NO:225, SEQ ID NO:226, SEQ ID NO:227, SEQ ID NO:228, SEQ ID NO:229, SEQ ID NO:230, SEQ ID NO:231, SEQ ID NO:232, SEQ ID NO:233, SEQ ID NO:234, SEQ ID NO:235, SEQ ID NO:236, SEQ ID NO:237, SEQ ID NO:238, SEQ ID NO:239, SEQ ID NO:240, SEQ ID NO:241, SEQ ID NO:242, SEQ ID NO:243, SEQ ID NO:244, SEQ ID NO:245, SEQ ID NO:246, SEQ ID NO:247, SEQ ID NO:248, SEQ ID NO:249, SEQ ID NO:250, SEQ ID NO:251, SEQ ID NO:252, SEQ ID NO:253, SEQ ID NO:254, SEQ ID NO:255, SEQ ID NO:256, SEQ ID NO:257, SEQ ID NO:258, SEQ ID NO:259, SEQ ID NO:260, SEQ ID NO:261, SEQ ID NO:262, SEQ ID NO:263, SEQ ID NO:264, SEQ ID NO:265, SEQ ID NO:266, SEQ ID NO:267, SEQ ID NO:268, SEQ ID NO:269, SEQ ID NO:270, SEQ ID NO:271, SEQ ID NO:272, SEQ ID NO:273, SEQ ID NO:274, SEQ ID NO:275, SEQ ID NO:276, SEQ ID NO:277, SEQ ID NO:278, SEQ ID NO:279, SEQ ID NO:280, SEQ ID NO:281, SEQ ID NO:282, SEQ ID NO:283, SEQ ID NO:284, SEQ ID NO:285, SEQ ID NO:286, SEQ ID NO:287, SEQ ID NO:288, SEQ ID NO:289, SEQ ID NO:290, SEQ ID NO:291, SEQ ID NO:292, SEQ ID NO:293, SEQ ID NO:294, SEQ ID NO:295, SEQ ID NO:296, SEQ ID NO:297, SEQ ID NO:298, SEQ ID NO:299, SEQ ID NO:300, SEQ ID NO:301, SEQ ID NO:302, SEQ ID NO:303, SEQ ID NO:304, SEQ ID NO:305, SEQ ID NO:306, SEQ ID NO:307, SEQ ID NO:308, SEQ ID NO:309, SEQ ID NO:310, SEQ ID NO:311, SEQ ID NO:312, SEQ ID NO:313, SEQ ID NO:314, SEQ ID NO:315, SEQ ID NO:316, SEQ ID NO:317, SEQ ID NO:318, SEQ ID NO:319, SEQ ID NO:320, SEQ ID NO:321, SEQ ID NO:322, SEQ ID NO:323, SEQ ID NO:324, SEQ ID NO:325, SEQ ID NO:326, SEQ ID NO:327, SEQ ID NO:328, SEQ ID NO:329, SEQ ID NO:330, SEQ ID NO:331, SEQ ID NO:332, SEQ ID NO:333, SEQ ID NO:334, SEQ ID NO:335, SEQ ID NO:336, SEQ ID NO:337, SEQ ID NO:338, SEQ ID NO:339, SEQ ID NO:340, SEQ ID NO:341, SEQ ID NO:342, SEQ ID NO:343, SEQ ID NO:344, SEQ ID NO:345, SEQ ID NO:346, SEQ ID NO:347, SEQ ID NO:348, SEQ ID NO:349, SEQ ID NO:350, SEQ ID NO:351, SEQ ID NO:352, SEQ ID NO:353, SEQ ID NO:354, SEQ ID NO:355, SEQ ID NO:356, SEQ ID NO:357, SEQ ID NO:358, SEQ ID NO:359, SEQ ID NO:360, SEQ ID NO:361, SEQ ID NO:362, SEQ ID NO:363, SEQ ID NO:364, SEQ ID NO:365, SEQ ID NO:366, SEQ ID NO:367, SEQ ID NO:368, SEQ ID NO:369, SEQ ID NO:370, SEQ ID NO:371, SEQ ID NO:372, SEQ ID NO:373, SEQ ID NO:374, SEQ ID NO:375, SEQ ID NO:376, SEQ ID NO:377, SEQ ID NO:378, SEQ ID NO:379, SEQ ID NO:380, SEQ ID NO:381, SEQ ID NO:382, SEQ ID NO:383, SEQ ID NO:384, SEQ ID NO:385, SEQ ID NO:386, SEQ ID NO:387, SEQ ID NO:388, SEQ ID NO:389, SEQ ID NO:390, SEQ ID NO:391, SEQ ID NO:392, SEQ ID NO:393, SEQ ID NO:394, SEQ ID NO:395, SEQ ID NO:396, SEQ ID NO:397, SEQ ID NO:398, SEQ ID NO:399, SEQ ID NO:400, SEQ ID NO:401, SEQ ID NO:402, SEQ ID NO:403, SEQ ID NO:404, SEQ ID NO:405, SEQ ID NO:406, SEQ ID NO:407, SEQ ID NO:408, SEQ ID NO:409, SEQ ID NO:410, SEQ ID NO:411, SEQ ID NO:412, SEQ ID NO:413, SEQ ID NO:414, SEQ ID NO:415, SEQ ID NO:416, SEQ ID NO:417, SEQ ID NO:418, SEQ ID NO:419, SEQ ID NO:420, SEQ ID NO:421, SEQ ID NO:422, SEQ ID NO:423, SEQ ID NO:424, SEQ ID NO:425, SEQ ID NO:426, SEQ ID NO:427, SEQ ID NO:428, SEQ ID NO:429, SEQ ID NO:430, SEQ ID NO:431, SEQ ID NO:432, SEQ ID NO:433, SEQ ID NO:434, SEQ ID NO:435, SEQ ID NO:436, SEQ ID NO:437, SEQ ID NO:438, SEQ ID NO:439, SEQ ID NO:440, SEQ ID NO:441, SEQ ID NO:442, SEQ ID NO:443, SEQ ID NO:444, SEQ ID NO:445, SEQ ID NO:446, SEQ ID NO:447, SEQ ID NO:448, SEQ ID NO:449, SEQ ID NO:450, SEQ ID NO:451, SEQ ID NO:452, SEQ ID NO:453, SEQ ID NO:454, SEQ ID NO:455, SEQ ID NO:456, SEQ ID NO:457, SEQ ID NO:458, SEQ ID NO:459, SEQ ID NO:460, SEQ ID NO:461, SEQ ID NO:462, SEQ ID NO:463, SEQ ID NO:464, SEQ ID NO:465, SEQ ID NO:466, SEQ ID NO:467, SEQ ID NO:468, SEQ ID NO:469, SEQ ID NO:470, SEQ ID NO:471, SEQ ID NO:472, SEQ ID NO:473, SEQ ID NO:474, SEQ ID NO:475, SEQ ID NO:476, SEQ ID NO:477, SEQ ID NO:478, SEQ ID NO:479, SEQ ID NO:480, SEQ ID NO:481, SEQ ID NO:482, SEQ ID NO:483, SEQ ID NO:484, SEQ ID NO:485, SEQ ID NO:486, SEQ ID NO:487, SEQ ID NO:488, SEQ ID NO:489, SEQ ID NO:490, SEQ ID NO:491, SEQ ID NO:492, SEQ ID NO:493, SEQ ID NO:494, SEQ ID NO:495, SEQ ID NO:496, SEQ ID NO:497, SEQ ID NO:498, SEQ ID NO:499, SEQ ID NO:500, SEQ ID NO:501, SEQ ID NO:502, SEQ ID NO:503, SEQ ID NO:504, SEQ ID NO:505, SEQ ID NO:506, SEQ ID NO:507, SEQ ID NO:508, SEQ ID NO:509, SEQ ID NO:510, SEQ ID NO:511, SEQ ID NO:512, SEQ ID NO:513, SEQ ID NO:514, SEQ ID NO:515, SEQ ID NO:516, SEQ ID NO:517, SEQ ID NO:518, SEQ ID NO:519, SEQ ID NO:520, SEQ ID NO:521, SEQ ID NO:522, SEQ ID NO:523, SEQ ID NO:524, SEQ ID NO:525, SEQ ID NO:526, SEQ ID NO:527, SEQ ID NO:528, SEQ ID NO:529, SEQ ID NO:530, SEQ ID NO:531, SEQ ID NO:532, SEQ ID NO:533, SEQ ID NO:534, SEQ ID NO:535, SEQ ID NO:536, SEQ ID NO:537, SEQ ID NO:538, SEQ ID NO:539, SEQ ID NO:540, SEQ ID NO:541, SEQ ID NO:542, SEQ ID NO:543, SEQ ID NO:544, SEQ ID NO:545, SEQ ID NO:546, SEQ ID NO:547, SEQ ID NO:548, SEQ ID NO:549, SEQ ID NO:550, SEQ ID NO:551, SEQ ID NO:552, SEQ ID NO:553, SEQ ID NO:554, SEQ ID NO:555, SEQ ID NO:556, SEQ ID NO:557, SEQ ID NO:558, SEQ ID NO:559, SEQ ID NO:560, SEQ ID NO:561, SEQ ID NO:562, SEQ ID NO:563, SEQ ID NO:564, SEQ ID NO:565, SEQ ID NO:566, SEQ ID NO:567, SEQ ID NO:568, SEQ ID NO:569, SEQ ID NO:570, SEQ ID NO:571, SEQ ID NO:572, SEQ ID NO:573, SEQ ID NO:574, SEQ ID NO:575, SEQ ID NO:576, SEQ ID NO:577, SEQ ID NO:578, SEQ ID NO:579, SEQ ID NO:580, SEQ ID NO:581, SEQ ID NO:582, SEQ ID NO:583, SEQ ID NO:584, SEQ ID NO:585, SEQ ID NO:586, SEQ ID NO:587, SEQ ID NO:588, SEQ ID NO:589, SEQ ID NO:590, SEQ ID NO:591, SEQ ID NO:592, SEQ ID NO:593, SEQ ID NO:594, SEQ ID NO:595, SEQ ID NO:596, SEQ ID NO:597, SEQ ID NO:598, SEQ ID NO:599, SEQ ID NO:600, SEQ ID NO:601, SEQ ID NO:602, SEQ ID NO:603, SEQ ID NO:604, SEQ ID NO:605, SEQ ID NO:606, SEQ ID NO:607, SEQ ID NO:608, SEQ ID NO:609, SEQ ID NO:610, SEQ ID NO:611, SEQ ID NO:612, SEQ ID NO:613, SEQ ID NO:614, SEQ ID NO:615, SEQ ID NO:616, SEQ ID NO:617, SEQ ID NO:618, SEQ ID NO:619, SEQ ID NO:620, SEQ ID NO:621, SEQ ID NO:622, SEQ ID NO:623, SEQ ID NO:624, SEQ ID NO:625;
or to a complement of said sequence.

4. The polynucleotide of any one of claims 1-3, wherein said polynucleotide is operably linked to at least one expression control sequence.

5. A vector comprising the polynucleotide of claim 4.

6. A host cell transformed with a vector comprising the polynucleotide of any one of claims 1-3.

7. A process for producing a protein encoded by the polynucleotide of claim 4, which process comprises:
(a) growing a culture of a host cell in a suitable culture medium, wherein the host cell has been transformed with the polynucleotide of claim 4; and
(b) purifying said protein from the culture.

8. A protein produced according to the process of claim 7.

9. An antibody that specifically binds to the protein of claim 8.

10. A method for detecting the protein of claim 8, comprising contacting a sample suspected of containing the protein with an antibody that specifically binds to the protein, under conditions such that the antibody binds the protein and the protein is detected.

11. A method for detecting the polynucleotide of any one of claims 1-3, comprising contacting a sample suspected of containing the polynucleotide with a polynucleotide reagent that hybridizes to the polynucleotide, under conditions such that the reagent binds the polynucleotide and the polynucleotide is detected.

12. The method of claim 10, wherein the sample is a biological sample.

13. The method of claim 12, where the biological sample is isolated from a human.

14. The method of claim 11, wherein the sample is a biological sample.

15. The method of claim 14, where the biological sample is isolated from a human.

16. A method of identifying a compound that modulates the activity of the protein of claim 8, comprising contacting a composition comprising the protein with a test compound and monitoring the effect of the test compound on the activity of the protein, such that a modulatory compound is identified.

17. A method of identifying a compound that modulates the expression of the polynucleotide of any one of claims 1-3, comprising contacting a cell that expresses the polynucleotide with a test compound and determining the effect of the test compound on the expression of the polynucleotide, such that a modulatory compound is identified.

18. A method of identifying a compound that modulates the production of the protein of claim 8, comprising contacting a cell that produces the protein with the test compound and determining the effect of the test compound on the production of the protein, such that a modulatory compound is identified.

19. A method of treating a subject having a disorder characterized by aberrant expression of the polynucleotide of any one of claims 1-3, comprising administering to said subject a therapeutically effective amount of a compound that modulates expression of the polypeptide, such that treatment is effected.

20. A method of treating a subject having a disorder characterized by aberrant production of the protein of claim 8, comprising administering to said subject a therapeutically effective amount of a compound that modulates production of the protein, such that treatment is effected.

21. A method of treating a subject having a disorder characterized by aberrant activity of the protein of claim 8, comprising administering to said subject a therapeutically effective amount of a compound that modulates activity of the protein, such that treatment is effected.
